(19) United States
(12) Patent Application Publication
(10) Pub. No.: US 2013/0171095 A1
(43) Pub. Date: Jul. 4, 2013

(54) Method for Purifying Antibodies

(71) Applicant: Xencor, Inc., Monrovia, CA (US)

(72) Inventors: Matthew J. BERNETT, Monrovia, CA (US); Gregory L. Moore, Monrovia, CA (US); John Desjarlais, Pasadena, CA (US); Rumana Rashid, Arcadia, CA (US)

(73) Assignee: Xencor, Inc., Monrovia, CA (US)

(21) Appl. No.: 13/648,951

(22) Filed: Oct. 10, 2012

Related U.S. Application Data
(63) Continuation-in-part of application No. 13/568,028, filed on Aug. 6, 2012.
(60) Provisional application No. 61/545,498, filed on Oct. 10, 2011.
(60) Provisional application No. 61/598,686, filed on Feb. 14, 2012.
(60) Provisional application No. 61/593,846, filed on Feb. 1, 2012.

(51) Int. Cl. C07K 16/46; C07K 14/535; C07K 14/745; C07K 14/525; C07K 14/755; C07K 14/54; C07K 14/52

(52) U.S. Cl. CPC C07K 16/468; C07K 14/54; C07K 14/5428; C07K 14/5434; C07K 14/535; C07K 14/521; C07K 14/523; C07K 14/525; C07K 14/755; C07K 14/745
USPC 424/85.2; 530/387.3; 530/351; 530/383; 530/384; 536/23.4; 435/328; 424/134.1; 424/85.1

(57) ABSTRACT

The invention relates generally to compositions and methods for purifying the desired species from a mixture of desired heterodimer and contaminating homodimer immunoglobulin variants by modifying the isoelectric point(s) of the individual chains.

### CROSS-REFERENCE TO RELATED APPLICATIONS

[0001] This application claims the benefit of U.S. Provisional Application Ser. No. 61/545,498, filed Oct. 10, 2011 and 61/598,686, filed Feb. 14, 2012 and 61/593,846, filed Feb. 1, 2012, and is also a continuation-in-part of U.S. Ser. No. 13/568,028 filed Aug. 6, 2012, which are incorporated herein by reference in their entirety.

### FIELD OF THE INVENTION

[0002] Methods for purifying the desired heterodimer species from contaminating homodimer antibody variants by modifying the isoelectric point are provided.

### BACKGROUND OF THE INVENTION

[0003] Antibodies are immunological proteins that bind a specific antigen. In most mammals, including humans and mice, antibodies are constructed from paired heavy and light polypeptide chains. Each chain is made up of individual immunoglobulin (Ig) domains, and thus the generic term immunoglobulin is used for such proteins. Each chain is made up of two distinct regions, referred to as the variable and constant regions. The light and heavy chain variable regions show significant sequence diversity between antibodies, and are responsible for binding the target antigen. The constant regions show less sequence diversity, and are responsible for binding a number of natural proteins to elicit important biochemical events. In humans there are five different classes of antibodies including IgA (which includes subclasses IgA1 and IgA2), IgD, IgE, IgG (which includes subclasses IgG1, IgG2, IgG3, and IgG4), and IgM. The distinguishing feature between these antibody classes is their constant regions, although subtler differences may exist in the V region. IgG antibodies are tetrameric proteins composed of two heavy chains and two light chains. The IgG heavy chain is composed of four immunoglobulin domains linked from N- to C-terminus in the order VH-CH1-CH2-CH3, referring to the heavy chain variable domain, heavy chain constant domain 1, heavy chain constant domain 2, and heavy chain constant domain 3 respectively (also referred to as VH-Cγ1-Cγ2-Cγ3, referring to the heavy chain variable domain, constant gamma 1 domain, constant gamma 2 domain, and constant gamma 3 domain respectively). The IgG light chain is composed of two immunoglobulin domains linked from N- to C-terminus in the order VL-CL, referring to the light chain variable domain and the light chain constant domain respectively.

[0004] Antibodies have serum half-lives in vivo ranging from one to three weeks. This favorable property is due to the preclusion of kidney filtration due to the large size of the full-length molecule, and interaction of the antibody Fc region with the neonatal Fc receptor FcRn. Binding to FcRn recycles endocytosed antibody from the endosome back to the bloodstream (Raghavan et al., 1996, Annu Rev Cell Dev Biol 12:181-220; Ghetie et al., 2000, Annu Rev Immunol 18:739-766, both entirely incorporated by reference).

[0005] Other properties of the antibody may determine its clearance rate (e.g. stability and half-life) in vivo. In addition to antibody binding to the FcRn receptor, other factors that contribute to clearance and half-life are serum aggregation, enzymatic degradation in the serum, inherent immunogenicity of the antibody leading to clearing by the immune system, antigen-mediated uptake, FcR (non-FcRn) mediated uptake and non-serum distribution (e.g. in different tissue compartments).

[0006] Recently it has been suggested that antibodies with variable regions that have lower isoelectric points may also have longer serum half-lives (Igawa et al., 2010 PEDS. 23(5): 385-392; US Publication 2011/0076275 both of which are entirely incorporated by reference). However, the mechanism of this is still poorly understood, and in fact the authors suggest that engineering the variable region is an alternative to engineering the Fc region. Moreover, variable regions differ from antibody to antibody. As such, each variable region must be altered without significantly affecting the binding affinity.

[0007] Accordingly, the present application defines the impact of charge state on antibody pharmacokinetics, and provides novel engineered variants in the constant regions to improve serum half-life.

### BRIEF SUMMARY OF THE INVENTION

[0008] Accordingly, one problem to be solved is to increase serum half life of antibodies by altering the constant domains, thus allowing the same constant regions to be used with different antigen binding sequences, e.g. the variable regions including the CDRs, and minimizing the possibility of immunogenic alterations. Thus providing antibodies with constant region variants with reduced pI and extended half-life provides a more modular approach to improving the pharmacokinetic properties of antibodies, as described herein. In addition, due to the methodologies outlined herein, the possibility of immunogenicity resulting from the pI variants is significantly reduced by importing pI variants from different IgG isotypes such that pI is reduced without introducing significant immunogenicity. Thus, an additional problem to be solved is the elucidation of low pI constant domains with high human sequence content, e.g. the minimization or avoidance of non-human residues at any particular position.

[0009] A further problem to be solved is that of purifying a desired antibody heterodimer species from the mixture obtained after transfection and standard Protein A chromatographic purification. The disadvantage of many methods for making heterodimeric antibodies such as heterodimeric Fc mutations (as described in US2011/0054151A1 and Gunasekaran et al., 2010 JBC. 285(25): 19637-19646) and “knobs-into-holes” formats (Ridgway et al., 1996 Protein Engineering. 9(7): 617-621; Atwell et al., 1997 JMB. 270, 26-35; Merchant et al., 1998 Nature Biotech. 16, 677-681) is that these formats can result in production of a significant amount of undesirable homodimers, thus necessitating further and often difficult purification steps, especially since the contaminating species are nearly identical to the desired species in many of their properties (molecular weight, etc.). By engineering each chain such that the difference in isolectric points between the desired heterodimer species and the contaminating homodimeric species is increased, a simple method of obtaining the desired species in high yield by methods that purify based on charge (e.g., ion exchange chromatography) can be used to obtain the desired heterodimer in high yield.

[0010] Accordingly, the present invention provides compositions comprising a heterodimer protein comprising a first and second monomer. The first monomer comprises a first variant heavy chain constant region and a first fusion partner, and the second monomer comprises a second variant heavy chain constant region with a second fusion partner, wherein the pIs of the first and second variant heavy chain constant regions are at least 0.5 logs apart.

[0011] In some embodiments, the fusion partners are independently and optionally selected from the group consisting of an immunoglobulin component, a peptide, a cytokine, a chemokine, an immune receptor and a blood factor. Preferred immunoglobulin components include selected from the group consisting of Fab, VH, VL, scFv, scFv2, dAb, different heavy chain variable regions (e.g. to form more traditional bispecific antibodies), as well as different single chain Fv regions. In a preferred embodiment, each monomer is a full-length heavy chain.

[0012] An additional aspect of the invention is where the pIs of the first and second monomer are at least 0.5 logs apart. Alternatively, the pIs of the first and second variant heavy chain constant regions are at least 0.5 logs apart.

[0013] In a further aspect, additional fusion partners are added to the first and/or second monomers.

[0014] In an additional aspect, the invention provides variant heavy chain constant regions comprises an amino acid substitution selected from the group consisting of Q196K, P217R, P228R, N276K, H435R and Y436F. In further aspects, one of the variant heavy chain constant regions further comprises a variant selected from the group consisting of S119E, K133E, K133Q, R133E (in case of IgG2-4), R133Q (in case of IgG2-4), T164E, K205E, K205Q, N208D, K210E, K210Q, K274E, K320E, K322E, K326E, K334E, R355E, K392E, Deletion of K447, adding peptide DEDE at the c-terminus, G137E, N₂₀₃D, K274Q, R355Q, K392N and Q419E, 349A, 349C, 349E, 349I, 349K, 349S, 349T, 349W, 351E, 351K, 354C, 356K, 357K, 364C, 364D, 364E, 364F, 364G, 364H, 364R, 364T, 364Y, 366D, 366K, 366S, 366W, 366Y, 368A, 368E, 368K, 368S, 370C, 370D, 370E, 370G, 370R, 370S, 370V, 392D, 392E, 394F, 394S, 394W, 394Y, 395T, 395V, 396T, 397E, 397S, 397T, 399K, 401K, 405A, 405S, 407T, 407V, 409D, 409E, 411D, 411E, 411K, 439D, 349C/364E, 349K/351K, 349K/351K/394F, 349K/354C, 349K/394F, 349K/394F/401K, 349K/394Y, 349K/401K, 349K/405A, 349T/351E/411E, 349T/394F, 349T/394F/401K, 349T/394F/411E, 349T/405A, 349T/411E, 351E/364D, 351E/364D/405A, 351E/364E, 351E/366D, 351K/364H/401K, 351K/366K, 364D/370G, 364D/394F, 364E/405A, 364E/405S, 364E/411E, 364E/411E/405A, 364H/394F, 364H/401K, 364H/401K/405A, 364H/405A, 364H/405A/411E, 364Y/370R, 370E/411E, 370R/411K, 395T/397S/405A and 397S/405A.

[0015] In additional aspects, the heterodimeric antibodies include light chains, including variant light chains. In some aspects, the variant light chain comprising an amino acid substitution selected from the group consisting of K126E, K126Q, K145E, K145Q, N152D, S156E, K169E, S202E, K207E, an addition of DEDE at the C-terminus, R108Q, Q124E, K126Q, N138D, K145T and Q199E.

[0016] In some aspects, the first and second variant heavy chain constant region comprises CH2 and CH3. In additional aspects, they comprise CH1, CH2 and CH3 with optional hinge regions.

[0017] In a further aspect, the invention provides methods for modifying the isoelectric point of an antibody monomer by introducing at least 6 amino acid mutations, including substitutions with non-native amino acids in a constant domain selected from the heavy chain constant domain and light chain constant domain, wherein the substituted amino acids have a pI lower than the native amino acid, such that said isoelectric point of the variant antibody is lowered by at least 0.5 logs. In some cases, only the heavy chain constant domain is altered; in some cases, only the light chain constant domain, and in some cases both the heavy and light constant domains comprise mutated amino acids.

[0018] In another aspect the methods provide for the generation of these variants by amino acid mutations selected from the group consisting of a non-native glutamic acid at position 119; a non-native cysteine at position 131; a non-native arginine, lysine or glutamine at position 133; a non-native glutamic acid at position 137; a non-native serine at position 138; a non-native glutamic acid at position 164; a non native asparagine at position 192; a non native phenylalanine at position 193, a non-native lysine at position 196, a non-native threonine at position 199, a non-native aspartic acid at position 203, a non-native glutamic acid or glutamine at position 205, a non native aspartic acid at position 208, a non-native glutamic acid or glutamine at position 210, a non native threonine at position 214, a non native arginine at position 217 and a non-native cysteine at position 219, a deletion at position 221, a non-native valine or threonine at position 222, a deletion at position 223, a non-native glutamic acid at position 224, a deletion at position 225, a deletion at position 235, a non-native glutamine or glutamic acid at position 274, a non-native phenylalanine at position 296, a non native phenylalanine at position 300, a non-native valine at position 309, a non-native glutamic acid at position 320, a non-native glutamic acid at position 322, a non-native glutamic acid at position 326, a non-native glycine at position 327, a non-native glutamic acid at position 334, a non native threonine at position 339, a non native glutamine or glutamic acid at position 355, a non-native serine at position 384, a non-native asparagine or glutamic acid at position 392, a non-native methionine at position 397, a non native glutamic acid at position 419, and a deletion or non-native aspartic acid at position 447, using EU numbering.

[0019] In a further aspect, the invention provides methods for modifying the isoelectric point of an antibody by introducing at least 2 amino acid mutations in the light constant domain, such that said isoelectric point of the variant antibody is lowered by at least 0.5 logs, and wherein said variant antibody comprises substitutions selected from the group consisting of a non-native glutamine or glutamic acid at position 126, a non-native glutamine, glutamic acid or threonine at position 145; a non-native aspartic acid at position 152, a non-native glutamic acid at position 156, a non-native glutamine or glutamic acid at position 169, a non-native glutamic acid at position 199, a non-native glutamic acid at position 202 and a a non-native glutamic acid at position 207 (using EU numbering).

[0020] In additional aspects, the invention provides methods for modifying the isoelectric point of an antibody by introducing: a) at least 6 amino acid mutations in the heavy constant domain, wherein said variant antibody comprises mutations selected from the group consisting of a non-native glutamic acid at position 119; a non-native cysteine at position 131; a non-native arginine, lysine or glutamine at position 133; a non-native glutamic acid at position 137; a non-native serine at position 138; a non-native glutamic acid at position 164; a non native asparagine at position 192; a non native phenylalanine at position 193, a non-native lysine at position 196, a non-native threonine at position 199, a non-native aspartic acid at position 203, a non-native glutamic acid or glutamine at position 205, a non native aspartic acid at position 208, a non-native glutamic acid or glutamine at position 210, a non native threonine at position 214, a non native arginine at position 217 and a non-native cysteine at position 219, a deletion at position 221, a non-native valine or threonine at position 222, a deletion at position 223, a non-native glutamic acid at position 224, a deletion at position 225, a deletion at position 235, a non-native glutamine or glutamic acid at position 274, a non-native phenylalanine at position 296, a non native phenylalanine at position 300, a non-native valine at position 309, a non-native glutamic acid at position 320, a non-native glutamic acid at position 322, a non-native glutamic acid at position 326, a non-native glycine at position 327, a non-native glutamic acid at position 334, a non native threonine at position 339, a non native glutamine or glutamic acid at position 355, a non-native serine at position 384, a non-native asparagine or glutamic acid at position 392, a non-native methionine at position 397, a non native glutamic acid at position 419, and a deletion or non-native aspartic acid at position 447; and b) substituting at least 2 non-native amino acids in the light constant domain, wherein said variant antibody comprises substitutions selected from the group consisting of a non-native glutamine or glutamic acid at position 126, a non-native glutamine, glutamic acid or threonine at position 145; a non-native aspartic acid at position 152, a non-native glutamic acid at position 156, a non-native glutamine or glutamic acid at position 169, a non-native glutamic acid at position 199, a non-native glutamic acid at position 202 and a a non-native glutamic acid at position 207 (using EU numbering), such that said isoelectric point of the variant antibody is lowered by at least 0.5 logs.

[0021] In a further aspect, the invention provides nucleic acids encoding the antibodies, including a nucleic acid encoding a variant heavy chain constant domain and/or a nucleic acid encoding a variant light chain constant domain. Host cells containing the nucleic acids and methods of producing the antibodies are also included.

[0022] In an additional aspect, the invention provides antibodies comprising a variant heavy chain constant domain having the formula:

[SEQ. ID NO: 403]
A-X₁₁₉-T-K-G-P-S-V-F-P-L-A-P-X₁₃₁-S-X₁₃₃-S-T-S-
X₁₃₇-X₁₃₈-T-A-A-L-G-C-L-V-K-D-Y-F-P-E-P-V-T-V-S-W-
N-S-G-A-L-X₁₆₄-S-G-V-H-T-F-P-A-V-L-Q-S-S-G-L-Y-S-
L-S-S-V-V-T-V-P-S-S-X₁₉₂-X₁₉₃-G-T-X₁₉₆-T-Y-X₁₉₉-C-
N-V-X₂₀₃-H-X₂₀₅-P-S-X₂₀₈-T-X₂₁₀-V-D-K-X₂₁₄-V-E-
X₂₁₇-K-X₂₁₉-C-X₂₂₁-X₂₂₂-X₂₂₃-X₂₂₄-X₂₂₅-C-P-P-C-P-
A-P-X₂₃₃-X₂₃₄-X₂₃₅-X₂₃₆-G-P-S-V-F-L-F-P-P-K-P-K-D-
T-L-M-I-S-R-T-P-E-V-T-C-V-V-V-D-V-S-H-E-D-P-E-V-
X₂₇₄-F-N-W-Y-V-D-G-V-E-V-H-N-A-K-T-K-P-R-E-E-Q-
X₂₉₆-N-S-T-X₃₀₀-R-V-V-S-V-L-T-V-X₃₀₉-H-Q-D-W-L-N-
G-K-E-Y-X₃₂₀-C-X₃₂₂-V-S-N-X₃₂₆-X₃₂₇-L-P-A-P-I-E-
X₃₃₄-T-I-S-K-X₃₃₉-K-G-Q-P-R-E-P-Q-V-Y-T-L-P-P-S-
X₃₅₅-E-E-M-T-K-N-Q-V-S-L-T-C-L-V-K-G-F-Y-P-S-D-I-
A-V-E-W-E-S-X₃₈₄-G-Q-P-E-N-N-Y-X₃₉₂-T-T-P-P-X₃₉₇-
L-D-S-D-G-S-F-F-L-Y-S-K-L-T-V-D-K-S-R-W-Q-X₄₁₉-G-
N-V-F-S-C-S-V-X₄₂₈-H-E-A-L-H-X₄₃₄-H-Y-T-Q-K-S-L-
S-L-S-P-G-X₄₄₇,

[0023] wherein X₁₁₉ is selected from the group consisting of S and E;

[0024] wherein X₁₃₁ is selected from the group consisting of S and C;

[0025] wherein X₁₃₃ is selected from the group consisting of K, R, E, and Q;

[0026] wherein X₁₃₇ is selected from the group consisting of G and E;

[0027] wherein X₁₃₈ is selected from the group consisting of G and S;

[0028] wherein X₁₆₄ is selected from the group consisting of T and E;

[0029] wherein X₁₉₂ is selected from the group consisting of S and N;

[0030] wherein X₁₉₃ is selected from the group consisting of L and F;

[0031] wherein X₁₉₆ is selected from the group consisting of Q and K;

[0032] wherein X₁₉₉ is selected from the group consisting of I and T;

[0033] wherein X₂₀₃ is selected from the group consisting of N and D;

[0034] wherein X₂₀₅ is selected from the group consisting of K, E, and Q;

[0035] wherein X₂₀₈ is selected from the group consisting of N and D;

[0036] wherein X₂₁₀ is selected from the group consisting of K, E, and Q;

[0037] wherein X₂₁₄ is selected from the group consisting of K and T;

[0038] wherein X₂₁₇ is selected from the group consisting of P and R;

[0039] wherein X₂₁₉ is selected from the group consisting of S and C;

[0040] wherein X₂₂₀ is selected from the group consisting of C, PLG, and G;

[0041] wherein X₂₂₁ is selected from the group consisting of D and a deletion;

[0042] wherein X₂₂₂ is selected from the group consisting of K, V, and T;

[0043] wherein X₂₂₃ is selected from the group consisting of T and a deletion;

[0044] wherein X₂₂₄ is selected from the group consisting of H and E;

[0045] wherein X₂₂₅ is selected from the group consisting of T and a deletion;

[0046] wherein X₂₃₃ is selected from the group consisting of E and P;

[0047] wherein X₂₃₄ is selected from the group consisting of L and V;

[0048] wherein X₂₃₅ is selected from the group consisting of L, A, and a deletion;

[0049] wherein X₂₃₆ is selected from the group consisting of G, A, and a deletion;

[0050] wherein X₂₇₄ is selected from the group consisting of K, Q, and E;

[0051] wherein X₂₉₆ is selected from the group consisting of Y and F;

[0052] wherein X₃₀₀ is selected from the group consisting of Y and F;

[0053] wherein X₃₀₉ is selected from the group consisting of L and V;

[0054] wherein X₃₂₀ is selected from the group consisting of K and E;

[0055] wherein X₃₂₂ is selected from the group consisting of K and E;

[0056] wherein X₃₂₆ is selected from the group consisting of K and E;

[0057] wherein X₃₂₇ is selected from the group consisting of A and G;

[0058] wherein X₃₃₄ is selected from the group consisting of K and E;

[0059] wherein X₃₃₉ is selected from the group consisting of A and T;

[0060] wherein X₃₅₅ is selected from the group consisting of R, Q, and E;

[0061] wherein X₃₈₄ is selected from the group consisting of N and S;

[0062] wherein X₃₉₂ is selected from the group consisting of K, N, and E;

[0063] wherein X₃₉₇ is selected from the group consisting of V and M;

[0064] wherein X₄₁₉ is selected from the group consisting of Q and E;

[0065] wherein X₄₂₈ is selected from the group consisting of M and L;

[0066] wherein X₄₃₄ is selected from the group consisting of N and S; and

[0067] wherein X₄₄₇ is selected from the group consisting of K, DEDE, and a deletion;

[0068] wherein said variant heavy chain constant domain comprises at least 6 substitutions as compared to SEQ ID NO: 2 and said variant is not SEQ ID NO: 3.

[0069] In a further aspect the invention provides variant heavy chain constant domain comprises at least 10 or 15 substitutions as compared to SEQ ID NO: 2.

[0070] In an additional aspect, the invention provides antibodies with a variant light chain constant domain having the formula:

[SEQ ID NO: 404]
X₁₀₈-T-V-A-A-P-S-V-F-I-F-P-P-S-D-E-X₁₂₄-L-X₁₂₆-S-
G-T-A-S-V-V-C-L-L-N-X₁₃₈-F-Y-P-R-E-A-X₁₄₅-V-Q-W-K-
V-D-X₁₅₂-A-L-Q-X₁₅₆-G-N-S-Q-E-S-V-T-E-Q-D-S-X₁₆₉-
D-S-T-Y-S-L-S-S-T-L-T-L-S-K-A-D-Y-E-K-H-K-V-Y-A-C-
E-V-T-H-X₁₉₉-G-L-X₂₀₂-S-P-V-T-X₂₀₇-S-F-N-R-G-E-
X₂₁₄,

[0071] wherein X₁₀₈ is selected from the group consisting of R and Q;

[0072] wherein X₁₂₄ is selected from the group consisting of Q and E;

[0073] wherein X₁₂₆ is selected from the group consisting of K, E, and Q;

[0074] wherein X₁₃₈ is selected from the group consisting of N and D;

[0075] wherein X₁₄₅ is selected from the group consisting of K, E, Q, and T;

[0076] wherein X₁₅₂ is selected from the group consisting of N and D;

[0077] wherein X₁₅₆ is selected from the group consisting of S and E;

[0078] wherein X₁₆₉ is selected from the group consisting of K, E, and Q;

[0079] wherein X₁₉₉ is selected from the group consisting of Q and E;

[0080] wherein X₂₀₂ is selected from the group consisting of S and E; and

[0081] wherein X₂₀₇ is selected from the group consisting of K and E; and

[0082] wherein X₂₁₄ is selected from the group consisting of C and CDEDE.

[0083] wherein said variant light chain constant domain comprises at least 2 substitutions as compared to SEQ ID NO: 112.

### BRIEF DESCRIPTION OF THE DRAWINGS

[0084] FIG. 1. [SEQ ID NOS: 1-6] Amino acid sequences of wild-type constant regions used in the invention.

[0085] FIG. 2. [SEQ ID NOS: 411-414] Engineering of heavy chain CH1 domains. List of CH1 residues for the four IgG isotypes, fraction exposed, and examples of substitutions that can be made to lower pI. Numbering is according to the EU index.

[0086] FIG. 3. [SEQ ID NO: 415] Engineering of light chain CK domains. List of CK residues, fraction exposed, and substitutions that can be made to lower pI. Numbering is according to the EU index.

[0087] FIG. 4. [SEQ ID NOS: 7-8, 52-53] Amino acid sequences of pI engineered constant regions IgG1-CH1-pI(6) and CK-pI(6).

[0088] FIG. 5. [SEQ ID NOS: 9-10] Amino acid sequences of wild-type anti-VEGF VH and VL variable regions used in the invention.

[0089] FIG. 6. [SEQ ID NOS: 11-12] Amino acid sequences of the heavy and light chains of pI engineered anti-VEGF antibody XENP9493 IgG1-CH1-pI(6)-CK-pI(6) used in the invention.

[0090] FIG. 7. Structure of an antibody Fab domain showing the locations of pI lowering mutations in XENP9493 IgG1-CH1-pI(6)-CK-pI(6).

[0091] FIG. 8. Analysis of pI engineered anti-VEGF variants on an Agilent Bioanalyzer showing high purity.

[0092] FIG. 9. Analysis of pI engineered anti-VEGF variants on SEC showing high purity.

[0093] FIG. 10. Analysis of pI engineered anti-VEGF variants on an IEF gel showing variants have altered pI.

[0094] FIG. 11. Binding analysis (Biacore) of bevacizumab and pI engineered anti-VEGF binding to VEGF.

[0095] FIG. 12. DSC analysis of CH1 and CK pI engineered anti-VEGF showing high thermostability.

[0096] FIG. 13. PK of bevacizumab variants in huFcRn mice. The 9493 variant with pI-engineered CH1 and CK domains extends half-life in vivo.

[0097] FIG. 14. PK of a native IgG1 version of bevacizumab in four separate in vivo studies in huFcRn mice. The average IgG1 half-life was 3.2 days.

[0098] FIG. 15. PK of a native IgG2 version of bevacizumab in huFcRn mice.

[0099] FIG. 16. Correlation between half-life and isoelectric point (pI) of antibody variants with different constant chains.

[0100] FIG. 17. [SEQ ID NOS: 426-429] Amino acid sequence alignment of the IgG subclasses. Residues with a bounded box illustrate isotypic differences between the IgG's. Residues which contribute to a higher pI (K, R, and H) or lower pI (D and E) are highlighted in bold. Designed substitutions that either lower the pI, or extend an epitope are shown in gray.

[0101] FIG. 18. Amino acid sequence of the CK [SEQ ID NO. 443] and Cλ [SEQ ID NO. 444] light constant chains. Residues which contribute to a higher pI (K, R, and H) or lower pI (D and E) are highlighted in bold. Preferred positions that can be modified to lower the pI are shown in gray.

[0102] FIG. 19. [SEQ ID NOS: 13-16, 50-51, 55-57, 405-407] Amino acid sequences of pI-engineered variant heavy chains.

[0103] FIG. 20. [SEQ ID NOS: 17-18, 54, 58-60, 408-410] Amino acid sequences of pI-engineered variant light chains.

[0104] FIG. 21. PK results of pI-engineered variant bevacizumab antibodies in huFcRn mice.

[0105] FIG. 22. PK results of variants that combine pI-engineered modifications with Fc modifications that enhance binding to FcRn.

[0106] FIG. 23. Correlation between half-life and isoelectric point (pI) of native bevacizumab antibodies, pI-engineered variant versions with reduced pI, and native and pI-engineered versions that incorporate Fc modifications that improve binding to human FcRn.

[0107] FIG. 24. [SEQ ID NOS: 418-422] Amino acid sequence alignment of novel isotype IgG-pI-Iso3 with the IgG subclasses. Blue indicates a match between pI-iso3 and residues in the four native IgG's IgG1, IgG2, IgG3, and IgG4. Residues with a bounded box illustrate IgG isotypic differences that have been incorporated into IgG-pI-Iso3 that reduce pI.

[0108] FIG. 25. D[SEQ ID NOS: 416-417] Differences between IgG1 and IgG-pI-Iso3 in the hinge and Fc region.

[0109] FIG. 26. Differences between IgG1 and IgG-pI-Iso3 in the CH1 region.

[0110] FIG. 27. [SEQ ID NO: 423] Amino acid illustration of the CK-pI(4) variant. Red indicates lysine to glutamic acid charge substitutions relative to the native CK light constant chain.

[0111] FIG. 28. [SEQ ID NOS: 19-33, 61-69] Amino acid sequences of pI-engineered heavy and light constant chains.

[0112] FIG. 29. Analysis of basic residues in the antibody Fc region showing fraction exposed and the calculated energy for substitution to Glu normalized against the energy of the WT residue. Basic residues with a high fraction exposed and a favorable delta E for substitution to Glu are targets for charge swap mutations to lower pI.

[0113] FIG. 30. Plot showing the effect of charge swap mutations on antibody pI. As the pI gets lower the change in pI per charge swap decreases.

[0114] FIG. 31. PK results of pI-engineered isotypic variant bevacizumab antibodies (IgG-pI-Iso3) and combinations with substitution N434S in huFcRn mice.

[0115] FIG. 32. PK results of pI-engineered isotypic variant bevacizumab antibodies and combinations with substitution N434S in huFcRn mice.

[0116] FIG. 33. Scatter plot of PK results of pI-engineered isotypic variant bevacizumab antibodies and combinations with substitution N434S in huFcRn mice. Each point represents a single mouse from the study. It should be noted that the 428L substitution can also be added to each of these pI antibodies.

[0117] FIG. 34. Plot showing correlation between pI engineered variant pI and half-life (t1/2).

[0118] FIG. 35. Structural alignment of CK and C-lambda domains.

[0119] FIG. 36. Literature pIs of the 20 amino acids. It should be noted that the listed pIs are calculated as free amino acids; the actual pI of any side chain in the context of a protein is different, and thus this list is used to show pI trends and not absolute numbers for the purposes of the invention.

[0120] FIG. 37. Data table of exemplary pI-engineered variants listing:

| | |
|---|---|
| XenP# | the internal reference number |
| Name (HC) | heavy chain sequence designation |
| SEQ ID NO (HC) | corresponding SEQ ID NO of the heavy chain |
| | sequence |
| Name (LC) | light chain sequence designation |
| SEQ ID NO (LC) | corresponding SEQ ID NO of the light chain sequence |
| Calc. pI | calculated pI value for the entire antibody sequence, |
| | including heavy and light chain Fv + constant |
| | domains, with the Fv of bevacizumab and the constant |
| | domains as defined in the table |
| #KR | number of Lys or Arg residues in IgG1 with the Fv of |
| | bevacizumab and the constant domains as defined in |
| | the table |
| Delta KR (vs. | change in the number of Lys or Arg residues relative |
| WT) | to IgG1 wild-type sequence of bevacizumab |
| #DE | number of Asp or Glu residues in IgG1 with the Fv of |
| | bevacizumab and the constant domains as defined in |
| | the table |
| Delta DE (vs. | change in the number of Asp or Glu acid residues |
| WT) | relative to IgG1 wild-type sequence of bevacizumab |
| Charge state | derived from the total number of Lys and Arg minus |
| | the total number of Asp and Glu residues, assuming |
| | a pH of 7 |
| # HC Mutations | number of mutations in the heavy chain constant |
| vs IgG1 | domain as compared to IgG1 |
| # LC Mutations | number of mutations in the light chain constant |
| vs IgG1 | domain as compared to IgG1 |
| Total # of | total number of mutations in the heavy chain and light |
| Mutations | chain constant domains as compared to IgG1 |

[0121] FIG. 38. Outline of method of purifying a desired heterodimeric antibody species from a mixture of contaminating homodimer species by engineering to modify isoelectric points of individual chains.

[0122] FIG. 39. [SEQ ID NOS: 34-49, 70-73] Sequences of pI-engineered variants, including heterodimeric and bispecific constructs.

[0123] FIG. 40. IEF gel showing purification of the heterodimer species of the pI engineered variant XENP10653 from the homodimer species by anion exchange chromatography. As can be seen from lane 3, the desired heterodimer is obtained in high purity.

[0124] FIG. 41. Outline of method of purifying a desired heterodimeric bispecific mAb-Fv from a mixture of contaminating homodimer species by engineering to modify isoelectric points of individual chains.

[0125] FIG. 42. Outline of method of purifying a desired heterodimeric bispecific dual scFv-Fc from a mixture of contaminating homodimer species by engineering to modify isoelectric points of individual chains.

[0126] FIG. 43. [SEQ ID NOS: 425 and 442] List of heavy chain and light chain residues for human IgG1 and percent exposed surface area. Numbering is according to the EU index.

[0127] FIG. 44. Examples of acidic substitutions that can be made in the heavy chain to faciliate easy purification of a heterodimeric species. Calculated pI in the context of bevacizumab are listed for zero-substitution homodimer (IgG1/IgG1), one-substitution pI-engineered heterodimer (pI/IgG1), and two-substitution pI-engineered homodimer (pI/pI). The average difference in pI of the heterodimer from the homodimers (delta pI) is also listed.

[0128] FIG. 45. Examples of basic to neutral substitutions that can be made in the heavy chain to faciliate easy purification of a heterodimeric species. Calculated pI in the context of bevacizumab are listed for zero-substitution homodimer (IgG1/IgG1), one-substitution pI-engineered heterodimer (pI/IgG1), and two-substitution pI-engineered homodimer (pI/pI). The average difference in pI of the heterodimer from the homodimers (delta pI) is also listed.

[0129] FIG. 46. Examples of basic substitutions that can be made in the heavy chain to faciliate easy purification of a heterodimeric species. Calculated pI in the context of bevacizumab are listed for zero-substitution homodimer (IgG1/IgG1), one-substitution pI-engineered heterodimer (pI/IgG1), and two-substitution pI-engineered homodimer (pI/pI). The average difference in pI of the heterodimer from the homodimers (delta pI) is also listed.

[0130] FIG. 47. Examples of acidic to neutral substitutions that can be made in the heavy chain to faciliate easy purification of a heterodimeric species. Calculated pI in the context of bevacizumab are listed for zero-substitution homodimer (IgG1/IgG1), one-substitution pI-engineered heterodimer (pI/IgG1), and two-substitution pI-engineered homodimer (pI/pI). The average difference in pI of the heterodimer from the homodimers (delta pI) is also listed.

[0131] FIG. 48. Examples of acidic substitutions that can be made in the light chain to faciliate easy purification of a heterodimeric species. Calculated pI in the context of bevacizumab are listed for zero-substitution homodimer (IgG1/IgG1), one-substitution pI-engineered heterodimer (pI/IgG1), and two-substitution pI-engineered homodimer (pI/pI). The average difference in pI of the heterodimer from the homodimers (delta pI) is also listed.

[0132] FIG. 49. Examples of basic to neutral substitutions that can be made in the light chain to faciliate easy purification of a heterodimeric species. Calculated pI in the context of bevacizumab are listed for zero-substitution homodimer (IgG1/IgG1), one-substitution pI-engineered heterodimer (pI/IgG1), and two-substitution pI-engineered homodimer (pI/pI). The average difference in pI of the heterodimer from the homodimers (delta pI) is also listed.

[0133] FIG. 50. Examples of basic substitutions that can be made in the light chain to faciliate easy purification of a heterodimeric species. Calculated pI in the context of bevacizumab are listed for zero-substitution homodimer (IgG1/IgG1), one-substitution pI-engineered heterodimer (pI/IgG1), and two-substitution pI-engineered homodimer (pI/pI). The average difference in pI of the heterodimer from the homodimers (delta pI) is also listed.

[0134] FIG. 51. Examples of acidic to neutral substitutions that can be made in the light chain to faciliate easy purification of a heterodimeric species. Calculated pI in the context of bevacizumab are listed for zero-substitution homodimer (IgG1/IgG1), one-substitution pI-engineered heterodimer (pI/IgG1), and two-substitution pI-engineered homodimer (pI/pI). The average difference in pI of the heterodimer from the homodimers (delta pI) is also listed.

[0135] FIG. 52. [SEQ ID NOS: 430-441] Sequence alignment of the identified heavy chain constant domains (including IgG1, IgG2, IgG3, IgG4, iso1, iso2, iso3, ISO(−), ISO(+RR), ISO(+)). For IgG1, IgG2, IgG3, and IgG4, differences from the IgG1 sequence are highlighted in grey. For isotypic pI variants, differences from IgG1 are shown in black with white text.

[0136] FIG. 53. [SEQ ID NOS: 74-79] Sequences of ISO(−), ISO(+), ISO(+RR), Anti-VEGF ISO(−) heavy chain, Anti-VEGF ISO(+) heavy chain, and Anti-VEGF ISO(+RR) heavy chain.

[0137] FIG. 54. [SEQ ID NOS: 80-82] Sequence of XENP10783, Anti-VEGF ISO(−)×IgG1(WT). Also listed are the three expected species and their respective pI after transfection and protein A purification.

[0138] FIG. 55. [SEQ ID NOS: 83-85] Sequence of XENP10784, Anti-VEGF ISO(+RR)×IgG1(WT). Also listed are the three expected species and their respective pI after transfection and protein A purification.

[0139] FIG. 56. [SEQ ID NOS: 86-88] Sequence of XENP10896, Anti-VEGF ISO(−)×ISO(+RR). Also listed are the three expected species and their respective pI after transfection and protein A purification.

[0140] FIG. 57. [SEQ ID NOS: 89-91] Sequence of XENP10901, Anti-VEGF ISO(−)×ISO(+). Also listed are the three expected species and their respective pI after transfection and protein A purification.

[0141] FIG. 58. List of all possible reduced pI variants created from isotypic substitutions of IgG1, IgG2, IgG3, and IgG4. Shown are the pI values for the three expected species as well as the average delta pI between the heterodimer and the two homodimer species present when the variant heavy chain is transfected with IgG1-WT heavy chain.

[0142] FIG. 59. List of all possible increased pI variants created from isotypic substitutions of IgG1, IgG2, IgG3, and IgG4. Shown are the pI values for the three expected species as well as the average delta pI between the heterodimer and the two homodimer species present when the variant heavy chain is transfected with IgG1-WT heavy chain.

[0143] FIG. 60. Chromatogram and IEF gel demonstrating purification of the heterodimer species present when Anti-VEGF ISO(−), IgG1-WT, and Anti-VEGF WT light chain are transfected together. Purification is performed on a HiTrap SP HP cation exchange column using 50 mM MES @ pH 6.0 and eluted with a linear NaCl gradient (0-130 mM).

[0144] FIG. 61. Chromatogram and IEF gel demonstrating purification of the heterodimer species present when Anti-VEGF ISO(+RR), IgG1-WT, and Anti-VEGF WT light chain are transfected together. Purification is performed on a HiTrap SP HP cation exchange column using 50 mM MES @ pH 6.0 and eluted with a linear NaCl gradient (0-180 mM).

[0145] FIG. 62. Chromatogram and IEF gel demonstrating purification of the heterodimer species present when Anti-VEGF ISO(−), ISO(+RR), and Anti-VEGF WT light chain are transfected together. Purification is performed on a HiTrap SP HP cation exchange column using 50 mM MES @ pH 6.0 and eluted with a linear NaCl gradient (0-180 mM).

[0146] FIG. 63. Chromatogram and IEF gel demonstrating purification of the heterodimer species present when Anti-VEGF ISO(−), ISO(+), and Anti-VEGF WT light chain are transfected together. Purification is performed on a HiTrap SP HP cation exchange column using 50 mM MES @ pH 6.0 and eluted with a linear NaCl gradient (0-180 mM).

[0147] FIG. 64. Structure and sequences of a generic pI-engineered heterodimeric immunoglobulin variant. Domains filled with solid white or solid black may be pI-engineered.

[0148] FIG. 65. [SEQ ID NOS: 92-103] Examples of VH and VL regions that can be used to construct possible pI-engineered heterodimeric immunoglobulin variants illustrated in FIG. 64. Complementary-determining regions (CDRs) are underlined.

[0149] FIG. 66. [SEQ ID NOS: 104-106] Structure and sequences of an example of a pI-engineered heterodimeric immunoglobulin variant, specifically an anti-CD19×anti-CD3 mAb-Fv. The calculated pI values of desired heterodimeric and contaminating homodimeric species are listed. Domains that may be pI-engineered are filled with solid white or solid black.

[0150] FIG. 67. [SEQ ID NOS: 107-108] Structure and sequences of an example of a pI-engineered heterodimeric immunoglobulin variant, specifically an anti-CD19×anti-CD3 scFv2-Fc. The calculated pI values of desired heterodimeric and contaminating homodimeric species are listed. Domains that may be pI-engineered are filled with solid white or solid black.

[0151] FIG. 68. [SEQ ID NOS: 109-110] Structure and sequences of an example of a pI-engineered heterodimeric immunoglobulin variant, specifically an anti-CD19×anti-CD3 DART-Fc. The calculated pI values of desired heterodimeric and contaminating homodimeric species are listed. Domains that may be pI-engineered are filled with solid white or solid black.

[0152] FIG. 69. [SEQ ID NOS: 111-112] Structure and sequences of an example of a pI-engineered heterodimeric immunoglobulin variant, specifically an anti-CD19×anti-CD3 dual scFv-Fc. The calculated pI values of desired heterodimeric and contaminating homodimeric species are listed. Domains that may be pI-engineered are filled with solid white or solid black.

[0153] FIG. 70. [SEQ ID NOS: 113-115] Structure and sequences of an example of a pI-engineered heterodimeric immunoglobulin variant, specifically an anti-CD19×anti-CD3 mAb-scFv. The calculated pI values of desired heterodimeric and contaminating homodimeric species are listed. Domains that may be pI-engineered are filled with solid white or solid black.

[0154] FIG. 71. [SEQ ID NOS: 116-118] Structure and sequences of an example of a pI-engineered heterodimeric immunoglobulin variant, specifically an anti-CD19×anti-CD3 mAb-dAb. The calculated pI values of desired heterodimeric and contaminating homodimeric species are listed. Domains that may be pI-engineered are filled with solid white or solid black.

[0155] FIG. 72. [SEQ ID NOS: 119-120] Structure and sequences of an example of a pI-engineered heterodimeric immunoglobulin variant, specifically an anti-CD19×anti-CD3 Fv-Fab-Fc. The calculated pI values of desired heterodimeric and contaminating homodimeric species are listed. Domains that may be pI-engineered are filled with solid white or solid black.

[0156] FIG. 73. [SEQ ID NOS: 121-123] Structure and sequences of an example of a pI-engineered heterodimeric immunoglobulin variant, specifically an anti-CD19×anti-CD3 common light chain mAb. The calculated pI values of desired heterodimeric and contaminating homodimeric species are listed. Domains that may be pI-engineered are filled with solid white or solid black.

[0157] FIG. 74. [SEQ ID NOS: 124-126] Structure and sequences of an example of a pI-engineered heterodimeric immunoglobulin variant, specifically an anti-CD3 one-arm mAb. The calculated pI values of desired heterodimeric and contaminating homodimeric species are listed. Domains that may be pI-engineered are filled with solid white or solid black.

[0158] FIG. 75. [SEQ ID NOS: 127-128] Structure and sequences of an example of a pI-engineered heterodimeric immunoglobulin variant, specifically an anti-CD19×anti-CD3 Fab-Fv-Fc. The calculated pI values of desired heterodimeric and contaminating homodimeric species are listed. Domains that may be pI-engineered are filled with solid white or solid black.

[0159] FIG. 76. [SEQ ID NOS: 129-130] Structure and sequences of an example of a pI-engineered heterodimeric immunoglobulin variant, specifically an anti-CD19×anti-CD3 Fv-Fv-Fc. The calculated pI values of desired heterodimeric and contaminating homodimeric species are listed. Domains that may be pI-engineered are filled with solid white or solid black.

[0160] FIG. 77. [SEQ ID NOS: 131-132] Structure and sequences of an example of a pI-engineered heterodimeric immunoglobulin variant, specifically an anti-CD3 monovalent mAb. The calculated pI values of desired heterodimeric and contaminating homodimeric species are listed. Domains that may be pI-engineered are filled with solid white or solid black.

[0161] FIG. 78. [SEQ ID NOS: 133-135] Structure and sequences of a pI-engineered heterodimeric immunoglobulin variant, specifically an anti-CD19×anti-CD3 central mAb-Fv. The calculated pI values of desired heterodimeric and contaminating homodimeric species are listed. Domains that may be pI-engineered are filled with solid white or solid black.

[0162] FIG. 79. [SEQ ID NOS: 136-137] Structure and sequences of an example of a pI-engineered heterodimeric immunoglobulin variant, specifically an anti-CD19×anti-CD3 Fab-Fab-Fc. The calculated pI values of desired heterodimeric and contaminating homodimeric species are listed. Domains that may be pI-engineered are filled with solid white or solid black.

[0163] FIG. 80. [SEQ ID NOS: 138-139] Structure and sequences of XENP11355, a pI-engineered heterodimeric immunoglobulin variant, specifically an anti-CD19×anti-CD3 dual scFv-Fc. The calculated pI values of desired heterodimeric and contaminating homodimeric species are listed. Domains that are pI-engineered are filled with solid white (ISO(−)) or solid black (ISO(+RR)).

[0164] FIG. 81. Chromatogram (panels A, B) and Lonza IEF pH 3-10 gel plate (panel C) demonstrating purification of the desired XENP11355 heterodimer species (Peak and Lane B). Purification is performed on a HiTrap SP HP cation exchange column (5 mL) using Buffer A=50 mM MES at pH 6.0 and Buffer B=50 mM MES at pH 6.0 plus 1 M NaCl. A linear gradient (10-35% Buffer B) was used to affect the desired elution in addition to equilibration (0% Buffer B) and high salt wash (100% Buffer B) steps.

[0165] FIG. 82. [SEQ ID NOS: 140-141] Structure and sequences of XENP11139, a pI-engineered heterodimeric immunoglobulin variant, specifically an anti-CD19×anti-CD32b dual scFv-Fc. The calculated pI values of desired heterodimeric and contaminating homodimeric species are listed. Domains that are pI-engineered are filled with solid white (ISO(−)) or solid black (ISO(+)).

[0166] FIG. 83. Chromatogram (panels A, B) and Lonza IEF pH 3-10 gel plate (panel C) demonstrating purification of the desired XENP11139 heterodimer species (Peak and Lane B). Purification is performed on a HiTrap SP HP cation exchange column (1 mL) using Buffer A=50 mM MES at pH 6.0 and Buffer B=50 mM MES at pH 6.0 plus 1 M NaCl. A linear gradient (0-15% Buffer B) was used to affect the desired elution in addition to equilibration (0% Buffer B) and high salt wash (100% Buffer B) steps.

[0167] FIG. 84. [SEQ ID NOS: 142-143] Structure and sequences of XENP11338, a pI-engineered heterodimeric immunoglobulin variant, specifically an anti-CD19×anti-CD3 dual scFv-Fc. The calculated pI values of desired heterodimeric and contaminating homodimeric species are listed. Domains that are pI-engineered are filled with solid white (ISO(−)) or solid black (ISO(+)).

[0168] FIG. 85. Chromatogram (panels A, B) and Lonza IEF pH 3-10 gel plate (panel C) demonstrating purification of the desired XENP11338 heterodimer species (Peak and Lane B). Purification is performed on a HiTrap SP HP cation exchange column (1 mL) using Buffer A=50 mM MES at pH 6.0 and Buffer B=50 mM MES at pH 6.0 plus 1 M NaCl. A linear gradient (10-40% Buffer B) was used to affect the desired elution in addition to equilibration (0% Buffer B) and high salt wash (100% Buffer B) steps.

[0169] FIG. 86. [SEQ ID NOS: 144-145] Structure and sequences of XENP11233, a pI-engineered heterodimeric immunoglobulin variant, specifically an anti-CD40 monovalent mAb. The calculated pI values of desired heterodimeric and contaminating homodimeric species are listed. Domains that are pI-engineered are filled with solid white (ISO(−)) or solid black (ISO(+)).

[0170] FIG. 87. Lonza IEF pH 3-10 gel plate demonstrating the separation of the desired XENP11233 heterodimer species, which is denoted by an arrow.

[0171] FIG. 88. [SEQ ID NOS: 146-148] Structure and sequences of XENP11238, a pI-engineered heterodimeric immunoglobulin variant, specifically an anti-CD40 one-arm mAb. The calculated pI values of desired heterodimeric and contaminating homodimeric species are listed. Domains that are pI-engineered are filled with solid white (ISO(+)) or solid black (ISO(−)).

[0172] FIG. 89. Lonza IEF pH 3-10 gel plate demonstrating the separation of the desired XENP11238 heterodimer species, which is denoted by an arrow.

[0173] FIG. 90. Data table of exemplary pI-engineered variants listing:

| | |
|---|---|
| XenP# | the internal reference number |
| Name (HC) | heavy chain sequence designation |
| SEQ ID NO (HC) | corresponding SEQ ID NO of the heavy chain |
| | sequence |
| Name (LC) | light chain sequence designation |
| SEQ ID NO (LC) | corresponding SEQ ID NO of the light chain sequence |
| Calc. pI | calculated pI value for the entire antibody sequence, |
| | including heavy and light chain Fv + constant |
| | domains, with the Fv of bevacizumab and the constant |
| | domains as defined in the table |
| #KR | number of Lys or Arg residues in IgG1 with the Fv of |
| | bevacizumab and the constant domains as defined in |
| | the table |
| Delta KR (vs. | change in the number of Lys or Arg residues relative |
| WT) | to IgG1 wild-type sequence of bevacizumab |
| #DE | number of Asp or Glu residues in IgG1 with the Fv of |
| | bevacizumab and the constant domains as defined in |
| | the table |
| Delta DE (vs. | change in the number of Asp or Glu acid residues |
| WT) | relative to IgG1 wild-type sequence of bevacizumab |
| Charge state | derived from the total number of Lys and Arg minus |
| | the total number of Asp and Glu residues, assuming |
| | a pH of 7 |
| # HC Mutations | number of mutations in the heavy chain constant |
| vs IgG1 | domain as compared to IgG1 |
| # LC Mutations | number of mutations in the light chain constant |
| vs IgG1 | domain as compared to IgG1 |
| Total # of | total number of mutations in the heavy chain and light |
| Mutations | chain constant domains as compared to IgG1 |

[0174] FIG. 91. Correlation of identifier names, protein names, and HC and LC names.

[0175] FIG. 92. [SEQ ID NOS: 149-276] Sequences of HC pI variants of FIG. 89.

[0176] FIG. 93. [SEQ ID NOS. 277-401] Sequences of LC pI variants of FIG. 89.

### DETAILED DESCRIPTION OF THE INVENTION

### I. Overview

[0177] [1] An ongoing problem in antibody technologies is the desire for “bispecific” antibodies that bind to two different antigens simultaneously, in general thus allowing the different antigens to be brought into proximity and resulting in new functionalities and new therapies. In general, these antibodies are made by including genes for each heavy and light chain into the host cells. This generally results in the formation of the desired heterodimer (A-B), as well as the two homodimers (A-A and B-B). However, a major obstacle in the formation of multispecific antibodies is the difficulty in purifying the heterodimeric antibodies away from the homodimeric antibodies.
[2] The present invention is generally directed to the creation of multispecific heterodimeric proteins, including heterodimeric antibodies and heterodimeric fusion proteins. Each protein of the dimer contains all or part of a variant constant heavy region of an antibody, as well as a fusion partner, discussed below. As is known in the art, two constant heavy chain regions will associate and form a dimer of heavy chains. In general, the ability to form heterodimers is a function of engineering amino acid variants into the constant heavy region of each protein of the dimer (A and B) such that the heterodimers (A-B) can be easily purified from the homodimers (A-A and B-B). This is generally done as outlined herein using amino acid changes that alter the pI of each protein of the dimer away from each other, thus allowing separation of heterodimers and homodimers using the different pIs of the protein (e.g. on ion exchange columns or gels). As will be outlined below, these variants can be introduced into one or both of the monomer polypeptides; that is, the pI of one of the monomers (referred to herein for simplicity as “monomer A”) can be engineered away from monomer B, or both monomer A and B change be changed, with the pI of monomer A increasing and the pI of monomer B decreasing. Similarly, the pI changes of either or both monomers can be done by removing or adding a charged residue (e.g. a neutral amino acid is replaced by a positively or negatively charged amino acid residue, e.g. glycine to glutamic acid), changing a charged residue from positive or negative to the opposite charge (aspartic acid to lysine) or changing a charged residue to a neutral residue (e.g. loss of a charge; lysine to serine).
[3] Accordingly, the present invention provides for creating a sufficient change in pI in at least one of the monomers such that heterodimers can be separated from homodimers. As will be appreciated by those in the art, and as discussed further below, this can be done by using a “wild type” heavy chain constant region and a variant region that has been engineered to either increase or decrease it's pI (wt A-+B or wt A-−B), or by increasing one region and decreasing the other region (A+-B−).
[4] Thus, in general, the present invention is directed to altering the isoelectric point (pI) of at least one, if not both, of the monomers of a dimeric protein to form “pI heterodimers” (when the protein is an antibody, these are referred to as “pI antibodies”) by incorporating amino acid substitutions (“pI variants” or “pI substitutions”) into one or both of the monomers. As shown herein, the separation of the heterodimers from the two homodimers can be accomplished if the pIs of the two monomers differ by as little as 0.1 pH unit, with 0.2, 0.3, 0.4 and 0.5 or greater all finding use in the present invention.
[5] By using the constant region of the heavy chain, a more modular approach to designing and purifying multispecific proteins, including antibodies, is provided.
[6] In addition, many embodiments of the invention rely on the “importation” of lower pI amino acids at particular positions from one IgG isotype into another, thus reducing or eliminating the possibility of unwanted immunogenicity being introduced into the variants. That is, IgG1 is a common isotype for therapeutic antibodies for a variety of reasons, including high effector function. However, the heavy constant region of IgG1 has a higher pI than that of IgG2 (8.10 versus 7.31). By introducing IgG2 residues at particular positions into the IgG1 backbone, the pI of the resulting protein is lowered, and additionally exhibits longer serum half-life. For example, IgG1 has a glycine (pI 5.97) at position 137, and IgG2 has a glutamic acid (pI 3.22); importing the glutamic acid will affect the pI of the resulting protein. As is described below, a number of amino acid substitutions are generally required to significant affect the pI of the variant antibody. However, it should be noted as discussed below that even changes in IgG2 molecules allow for increased serum half-life. Thus, an additional problem to be solved is the elucidation of low pI constant domains with high human sequence content, e.g. the minimization or avoidance of non-human residues at any particular position.
[7] A side benefit that can occur with this pI engineering is also the extension of serum half-life and increased FcRn binding. That is, as described in U.S. Ser. No. 13/194,904 (incorporated by reference in its entirety), lowering the pI of antibody constant domains (including those found in antibodies and Fc fusions) can lead to longer serum retention in vivo. These pI variants for increased serum half life also facilitate pI changes for purification. Thus, in some embodiments, pI half life variants that increase serum half life also contribute to the ability to separate the heavy chains during purification. These pI half life variants are included in the definition of “pI variants” as discussed below, and can be used with any pI variant, as well as the “knobs and holes” sets of variants as described below.
[8] In addition to amino acid changes that alter pI, previous work that relies on amino acid engineering that creates steric influences to favor heterodimeric formation and disfavor homodimeric formation can also optionally be used; this is sometimes referred to as “knobs and holes”. Again, “knobs and holes” variants can optionally and independently be combined with pI variants, including pI half life variants.
[9] In addition, as described below, additional amino acid substitutions for other functionalities may be included in the pI antibodies of the invention, such as Fc variants that alter binding to Fc receptors, amino acid substitutions made for affinity maturation, etc.
[10] In addition to all or part of a variant heavy constant domain, one or both of the monomers may contain one or two fusion partners, such that the heterodimers form multivalent proteins. As is generally depicted the Figures, the fusion partners are depicted as A, B, C and D, with all combinations possible. In general, A, B, C and D are selected such that the heterodimer is at least bispecific or bivalent in its ability to interact with additional proteins.
As will be appreciated by those in the art and discussed more fully below, the heterodimeric fusion proteins of the present invention can take on a wide variety of configurations, as are generally depicted in the Figures. Some figures depict “single ended” configurations, where there is one type of specificity on one “arm” of the molecule and a different specificity on the other “arm”. Other figures depict “dual ended” configurations, where there is at least one type of specificity at the “top” of the molecule and one or more different specificities at the “bottom” of the molecule. Furthermore as is shown, these two configurations can be combined, where there can be triple or quadruple specificities based on the particular combination. Thus, the present invention provides “multispecific” binding proteins, including multispecific antibodies.

### II. Description of the Invention

[0178] Described herein are several definitions. Such definitions are meant to encompass grammatical equivalents.

[0179] By “ADCC” or “antibody dependent cell-mediated cytotoxicity” as used herein is meant the cell-mediated reaction wherein nonspecific cytotoxic cells that express FcγRs recognize bound antibody on a target cell and subsequently cause lysis of the target cell.

[0180] By “ADCP” or antibody dependent cell-mediated phagocytosis as used herein is meant the cell-mediated reaction wherein nonspecific cytotoxic cells that express FcγRs recognize bound antibody on a target cell and subsequently cause phagocytosis of the target cell.

[0181] By “amino acid” and “amino acid identity” as used herein is meant one of the naturally occurring amino acids or any non-natural analogues that may be present at a specific, defined position.

[0182] By “CDC” or “complement dependent cytotoxicity” as used herein is meant the reaction wherein one or more complement protein components recognize bound antibody on a target cell and subsequently cause lysis of the target cell.

[0183] By “effector function” as used herein is meant a biochemical event that results from the interaction of an antibody Fc region with an Fc receptor or ligand. Effector functions include FcγR-mediated effector functions such as ADCC and ADCP, and complement-mediated effector functions such as CDC. Further, effector functions include FcγRIIb-mediated effector functions, such as inhibitory functions (e.g., downregulating, reducing, inhibiting etc., B cell responses, e.g., a humoral immune response).

[0184] By “effector cell” as used herein is meant a cell of the immune system that expresses one or more Fc and/or complement receptors and mediates one or more effector functions. Effector cells include but are not limited to monocytes, macrophages, neutrophils, dendritic cells, eosinophils, mast cells, platelets, B cells, large granular lymphocytes, Langerhans' cells, natural killer (NK) cells, and γ.delta. T cells, and may be from any organism including but not limited to humans, mice, rats, rabbits, and monkeys.

[0185] By “Fab” or “Fab region” as used herein is meant the polypeptides that comprise the V.sub.H, CH1, V.sub.H, and C.sub.L immunoglobulin domains. Fab may refer to this region in isolation, or this region in the context of a full length antibody or antibody fragment.

[0186] By “Fc” or “Fc region” or “Fc domain”, as used herein is meant the polypeptide comprising the constant region of an antibody excluding the first constant region immunoglobulin domain and in some cases, part of the hinge. Thus Fc refers to the last two constant region immunoglobulin domains of IgA, IgD, and IgG, and the last three constant region immunoglobulin domains of IgE and IgM, and the flexible hinge N-terminal to these domains. For IgA and IgM, Fc may include the J chain. For IgG, Fc comprises immunoglobulin domains Cgamma2 and Cgamma3 (Cγ2 and Cγ3) and the hinge between Cgamma1 (Cγ1) and Cgamma2 (Cγ2). Although the boundaries of the Fc region may vary, the human IgG heavy chain Fc region is usually defined to comprise residues C226 or P230 to its carboxyl-terminus, wherein the numbering is according to the EU index as in Kabat. Fc may refer to this region in isolation, or this region in the context of an Fc polypeptide, as described below.

[0187] By “Fc polypeptide” as used herein is meant a polypeptide that comprises all or part of an Fc region. Fc polypeptides include antibodies, Fc fusions, isolated Fcs, and Fc fragments. Immunoglobulins may be Fc polypeptides.

[0188] By “Fc fusion” as used herein is meant a protein wherein one or more polypeptides is operably linked to an Fc domain, particularly a variant Fc domain. Fc fusion is herein meant to be synonymous with the terms “immunoadhesin”, “Ig fusion”, “Ig chimera”, and “receptor globulin” (sometimes with dashes) as used in the prior art (Chamow et al., 1996, Trends Biotechnol 14:52-60; Ashkenazi et al., 1997, Curr Opin Immunol 9:195-200, both hereby entirely incorporated by reference). An Fc fusion combines the Fc region of an immunoglobulin with a fusion partner, which in general may be any protein, polypeptide or small molecule. The role of the non-Fc part (in most cases for this invention, the pI domain) of an Fc fusion, i.e., the fusion partner, is to mediate target binding, and thus it is functionally analogous to the variable regions of an antibody. Virtually any protein or small molecule may be linked to Fc to generate an Fc fusion. Protein fusion partners may include, but are not limited to, the target-binding region of a receptor, an adhesion molecule, a ligand, an enzyme, a cytokine, a chemokine, or some other protein or protein domain. Small molecule fusion partners may include any therapeutic agent that directs the Fc fusion to a therapeutic target. Such targets may be any molecule, e.g., an extracellular receptor that is implicated in disease.

[0189] By “Fc gamma receptor” or “FcγR” as used herein is meant any member of the family of proteins that bind the IgG antibody Fc region and are substantially encoded by the FcγR genes. In humans this family includes but is not limited to FcγRI (CD64), including isoforms FcγRIa, FcγRIb, and FcγRIc; FcγRII (CD32), including isoforms FcγRIIa (including allotypes H131 and R131), FcγRIIb (including FcγRIIb-1 and FcγRIIb-2), and FcγRIIc; and FcγRIII (CD16), including isoforms FcγRIIIa (including allotypes V158 and F158) and FcγRIIIb (including allotypes FcγRIIIb-NA1 and FcγRIIIb-NA2) (Jefferis et al., 2002, Immunol Lett 82:57-65, incorporated entirely by reference), as well as any undiscovered human FcγRs or FcγR isoforms or allotypes. An FcγR may be from any organism, including but not limited to humans, mice, rats, rabbits, and monkeys. Mouse FcγRs include but are not limited to FcγRI (CD64), FcγRII (CD32), FcγRIII (CD16), and FcγRIII-2 (CD16-2), as well as any undiscovered mouse FcγRs or FcγR isoforms or allotypes.

[0190] By “Fc ligand” or “Fc receptor” as used herein is meant a molecule, e.g., a polypeptide, from any organism that binds to the Fc region of an antibody to form an Fc-ligand complex. Fc ligands include but are not limited to FcγRs, FcγRs, FcγRs, FcRn, Clq, C3, mannan binding lectin, mannose receptor, staphylococcal protein A, streptococcal protein G, and viral FcγR. Fc ligands also include Fc receptor homologs (FcRH), which are a family of Fc receptors that are homologous to the FcγRs (Davis et al., 2002, Immunological Reviews 190:123-136). Fc ligands may include undiscovered molecules that bind Fc.

[0191] By “modification” herein is meant an alteration in the physical, chemical, or sequence properties of a protein, polypeptide, antibody, or immunoglobulin. Modifications described herein include amino acid modifications and glycoform modifications.

[0192] By “amino acid modification” herein is meant an amino acid substitution, insertion, and/or deletion in a polypeptide sequence. By “amino acid substitution” or “substitution” herein is meant the replacement of an amino acid at a particular position in a parent polypeptide sequence with another, different amino acid. For clarity, an “amino acid substitution” requires a different amino acid than the parent amino acid at the substituted position. For example, the substitution S267E refers to a variant polypeptide, in this case a constant heavy chain variant, in which the serine at position 267 is replaced with glutamic acid. By “amino acid insertion” or “insertion” as used herein is meant the addition of an amino acid at a particular position in a parent polypeptide sequence. By “amino acid deletion” or “deletion” as used herein is meant the removal of an amino acid at a particular position in a parent polypeptide sequence.

[0193] By “glycoform modification” or “modified glycoform” or “engineered glycoform” as used herein is meant a carbohydrate composition that is covalently attached to a protein, for example an antibody, wherein said carbohydrate composition differs chemically from that of a parent protein. Modified glycoform typically refers to the different carbohydrate or oligosaccharide; thus for example an Fc variant may comprise a modified glycoform. Alternatively, modified glycoform may refer to the Fc variant that comprises the different carbohydrate or oligosaccharide.

[0194] By “parent polypeptide”, “parent protein”, “parent immunogloblin”, “precursor polypeptide”, “precursor protein”, or “precursor immunoglobulin” as used herein is meant an unmodified polypeptide, protein, or immunoglobulin that is subsequently modified to generate a variant, e.g., any polypeptide, protein or immunoglobulin which serves as a template and/or basis for at least one amino acid modification described herein. The parent polypeptide may be a naturally occurring polypeptide, or a variant or engineered version of a naturally occurring polypeptide. Parent polypeptide may refer to the polypeptide itself, compositions that comprise the parent polypeptide, or the amino acid sequence that encodes it. Accordingly, by “parent Fc polypeptide” as used herein is meant an Fc polypeptide that is modified to generate a variant Fc polypeptide, and by “parent antibody” as used herein is meant an antibody that is modified to generate a variant antibody (e.g., a parent antibody may include, but is not limited to, a protein comprising the constant region of a naturally occurring Ig).

[0195] By “position” as used herein is meant a location in the sequence of a protein. Positions may be numbered sequentially, or according to an established format, for example the EU index as in Kabat. For example, position 297 is a position in the human antibody IgG1.

[0196] By “polypeptide” or “protein” as used herein is meant at least two covalently attached amino acids, which includes proteins, polypeptides, oligopeptides and peptides.

[0197] By “residue” as used herein is meant a position in a protein and its associated amino acid identity. For example, Asparagine 297 (also referred to as Asn297, also referred to as N297) is a residue in the human antibody IgG1.

[0198] By “target antigen” as used herein is meant the molecule that is bound by the variable region of a given antibody, or the fusion partner of an Fc fusion. A target antigen may be a protein, carbohydrate, lipid, or other chemical compound. An antibody or Fc fusion is said to be “specific” for a given target antigen based on having affinity for the target antigen. A variety of target antigens are listed below.

[0199] By “target cell” as used herein is meant a cell that expresses a target antigen.

[0200] By “variable region” as used herein is meant the region of an immunoglobulin that comprises one or more Ig domains substantially encoded by any of the V.kappa., V.lamda., and/or VH genes that make up the kappa, lambda, and heavy chain immunoglobulin genetic loci respectively.

[0201] By “variant polypeptide”, “polypeptide variant”, or “variant” as used herein is meant a polypeptide sequence that differs from that of a parent polypeptide sequence by virtue of at least one amino acid modification. The parent polypeptide may be a naturally occurring or wild-type (WT) polypeptide, or may be a modified version of a WT polypeptide. Variant polypeptide may refer to the polypeptide itself, a composition comprising the polypeptide, or the amino sequence that encodes it. In some embodiments, variant polypeptides disclosed herein (e.g., variant immunoglobulins) may have at least one amino acid modification compared to the parent polypeptide, e.g. from about one to about ten amino acid modifications, from about one to about five amino acid modifications, etc. compared to the parent. The variant polypeptide sequence herein may possess at least about 80% homology with a parent polypeptide sequence, e.g., at least about 90% homology, 95% homology, etc. Accordingly, by “Fc variant” or “variant Fc” as used herein is meant an Fc sequence that differs from that of a parent Fc sequence by virtue of at least one amino acid modification. An Fc variant may only encompass an Fc region, or may exist in the context of an antibody, Fc fusion, isolated Fc, Fc fragment, or other polypeptide that is substantially encoded by Fc. Fc variant may refer to the Fc polypeptide itself, compositions comprising the Fc variant polypeptide, or the amino acid sequence that encodes it. By “Fc polypeptide variant” or “variant Fc polypeptide” as used herein is meant an Fc polypeptide that differs from a parent Fc polypeptide by virtue of at least one amino acid modification. By “protein variant” or “variant protein” as used herein is meant a protein that differs from a parent protein by virtue of at least one amino acid modification. By “antibody variant” or “variant antibody” as used herein is meant an antibody that differs from a parent antibody by virtue of at least one amino acid modification. By “IgG variant” or “variant IgG” as used herein is meant an antibody that differs from a parent IgG by virtue of at least one amino acid modification. By “immunoglobulin variant” or “variant immunoglobulin” as used herein is meant an immunoglobulin sequence that differs from that of a parent immunoglobulin sequence by virtue of at least one amino acid modification.

[0202] By “wild type” or “WT” herein is meant an amino acid sequence or a nucleotide sequence that is found in nature, including allelic variations. A WT protein, polypeptide, antibody, immunoglobulin, IgG, etc. has an amino acid sequence or a nucleotide sequence that has not been intentionally modified.

### B. Antibodies

[0203] The present invention relates to the generation of pI variants of antibodies, generally therapeutic antibodies. As is discussed below, the term “antibody” is used generally. Antibodies that find use in the present invention can take on a number of formats as described herein, including traditional antibodies as well as antibody derivatives, fragments and mimetics, described below. In general, the term “antibody” for the purposes of this invention includes any polypeptide that includes at least one constant domain, including, but not limited to, CH1, CH2, CH3 and CL. That is, the pI engineering of constant regions can be used with “traditional” antibody technologies, such as variable regions, to form multispecific antibodies, or the technology can be used with fusion partners to make bispecific binding proteins. Unless otherwise stated, “antibody” includes the use of pI engineered constant regions to make multispecific proteins, including fusion partners comprising variable regions.

[0204] In general, the specification references “heavy chain constant domains”, which comprise CH1-hinge-CH2-CH3 components (e.g. without the heavy chain variable domain), also sometimes referred to as “CH1-Fc domains”. However, in some cases, the pI variants are made using just the Fc region.

[0205] Traditional antibody structural units typically comprise a tetramer. Each tetramer is typically composed of two identical pairs of polypeptide chains, each pair having one “light” (typically having a molecular weight of about 25 kDa) and one “heavy” chain (typically having a molecular weight of about 50-70 kDa). Human light chains are classified as kappa and lambda light chains. The present invention is directed to the IgG class, which has several subclasses, including, but not limited to IgG1, IgG2, IgG3, and IgG4. Thus, “isotype” as used herein is meant any of the subclasses of immunoglobulins defined by the chemical and antigenic characteristics of their constant regions. It should be understood that therapeutic antibodies can also comprise hybrids of isotypes and/or subclasses. For example, as shown herein, the present invention covers pI engineering of IgG1/G2 hybrids.

[0206] The amino-terminal portion of each chain includes a variable region of about 100 to 110 or more amino acids primarily responsible for antigen recognition, generally referred to in the art and herein as the “Fv domain” or “Fv region”. In the variable region, three loops are gathered for each of the V domains of the heavy chain and light chain to form an antigen-binding site. Each of the loops is referred to as a complementarity-determining region (hereinafter referred to as a “CDR”), in which the variation in the amino acid sequence is most significant. “Variable” refers to the fact that certain segments of the variable region differ extensively in sequence among antibodies. Variability within the variable region is not evenly distributed. Instead, the V regions consist of relatively invariant stretches called framework regions (FRs) of 15-30 amino acids separated by shorter regions of extreme variability called “hypervariable regions” that are each 9-15 amino acids long or longer.

[0207] In some embodiments, the pI engineered constant regions can be joined to single chain Fv (“scFv”) regions, such that the heteroproteins of the invention comprise a first pI engineered constant chain with a first scFv with binding specificity to a first antigen, and a second pI engineered constant chain with a second scFv with binding specificity to a second antigen. Alternative formats are also found in the Figures and described herein.

[0208] Each VH and VL is composed of three hypervariable regions (“complementary determining regions,” “CDRs”) and four FRs, arranged from amino-terminus to carboxy-terminus in the following order: FR1-CDR1-FR2-CDR2-FR3-CDR3-FR4.

[0209] The hypervariable region generally encompasses amino acid residues from about amino acid residues 24-34 (LCDR1; “L” denotes light chain), 50-56 (LCDR2) and 89-97 (LCDR3) in the light chain variable region and around about 31-35B (HCDR1; “H” denotes heavy chain), 50-65 (HCDR2), and 95-102 (HCDR3) in the heavy chain variable region; Kabat et al., SEQUENCES OF PROTEINS OF IMMUNOLOGICAL INTEREST, 5^{th} Ed. Public Health Service, National Institutes of Health, Bethesda, Md. (1991) and/or those residues forming a hypervariable loop (e.g. residues 26-32 (LCDR1), 50-52 (LCDR2) and 91-96 (LCDR3) in the light chain variable region and 26-32 (HCDR1), 53-55 (HCDR2) and 96-101 (HCDR3) in the heavy chain variable region; Chothia and Lesk (1987) J. Mol. Biol. 196:901-917. Specific CDRs of the invention are described below.

[0210] Throughout the present specification, the Kabat numbering system is generally used when referring to a residue in the variable domain (approximately, residues 1-107 of the light chain variable region and residues 1-113 of the heavy chain variable region) (e.g, Kabat et al., supra (1991)).

[0211] The CDRs contribute to the formation of the antigen-binding, or more specifically, epitope binding site of antibodies. “Epitope” refers to a determinant that interacts with a specific antigen binding site in the variable region of an antibody molecule known as a paratope. Epitopes are groupings of molecules such as amino acids or sugar side chains and usually have specific structural characteristics, as well as specific charge characteristics. A single antigen may have more than one epitope.

[0212] The epitope may comprise amino acid residues directly involved in the binding (also called immunodominant component of the epitope) and other amino acid residues, which are not directly involved in the binding, such as amino acid residues which are effectively blocked by the specifically antigen binding peptide; in other words, the amino acid residue is within the footprint of the specifically antigen binding peptide.

[0213] Epitopes may be either conformational or linear. A conformational epitope is produced by spatially juxtaposed amino acids from different segments of the linear polypeptide chain. A linear epitope is one produced by adjacent amino acid residues in a polypeptide chain. Conformational and nonconformational epitopes may be distinguished in that the binding to the former but not the latter is lost in the presence of denaturing solvents.

[0214] An epitope typically includes at least 3, and more usually, at least 5 or 8-10 amino acids in a unique spatial conformation. Antibodies that recognize the same epitope can be verified in a simple immunoassay showing the ability of one antibody to block the binding of another antibody to a target antigen, for example “binning.”

[0215] The carboxy-terminal portion of each chain defines a constant region primarily responsible for effector function. Kabat et al. collected numerous primary sequences of the variable regions of heavy chains and light chains. Based on the degree of conservation of the sequences, they classified individual primary sequences into the CDR and the framework and made a list thereof (see SEQUENCES OF IMMUNOLOGICAL INTEREST, 5^{th} edition, NIH publication, No. 91-3242, E. A. Kabat et al., entirely incorporated by reference).

[0216] In the IgG subclass of immunoglobulins, there are several immunoglobulin domains in the heavy chain. By “immunoglobulin (Ig) domain” herein is meant a region of an immunoglobulin having a distinct tertiary structure. Of interest in the present invention are the heavy chain domains, including, the constant heavy (CH) domains and the hinge domains. In the context of IgG antibodies, the IgG isotypes each have three CH regions. Accordingly, “CH” domains in the context of IgG are as follows: “CH1” refers to positions 118-220 according to the EU index as in Kabat. “CH2” refers to positions 237-340 according to the EU index as in Kabat, and “CH3” refers to positions 341-447 according to the EU index as in Kabat. As shown herein and described below, the pI variants can be in one or more of the CH regions, as well as the hinge region, discussed below.

[0217] It should be noted that the sequences depicted herein start at the CH1 region, position 118; the variable regions are not included except as noted. For example, the first amino acid of SEQ ID NO: 2, while designated as position“1” in the sequence listing, corresponds to position 118 of the CH1 region, according to EU numbering.

[0218] Another type of Ig domain of the heavy chain is the hinge region. By “hinge” or “hinge region” or “antibody hinge region” or “immunoglobulin hinge region” herein is meant the flexible polypeptide comprising the amino acids between the first and second constant domains of an antibody. Structurally, the IgG CH1 domain ends at EU position 220, and the IgG CH2 domain begins at residue EU position 237. Thus for IgG the antibody hinge is herein defined to include positions 221 (D221 in IgG1) to 236 (G236 in IgG1), wherein the numbering is according to the EU index as in Kabat. In some embodiments, for example in the context of an Fc region, the lower hinge is included, with the “lower hinge” generally referring to positions 226 or 230. As noted herein, pI variants can be made in the hinge region as well.

[0219] The light chain generally comprises two domains, the variable light domain (containing the light chain CDRs and together with the variable heavy domains forming the Fv region), and a constant light chain region (often referred to as CL or Cκ).

[0220] Another region of interest for additional substitutions, outlined below, is the Fc region. By “Fc” or “Fc region” or “Fc domain” as used herein is meant the polypeptide comprising the constant region of an antibody excluding the first constant region immunoglobulin domain and in some cases, part of the hinge. Thus Fc refers to the last two constant region immunoglobulin domains of IgA, IgD, and IgG, the last three constant region immunoglobulin domains of IgE and IgM, and the flexible hinge N-terminal to these domains. For IgA and IgM, Fc may include the J chain. For IgG, the Fc domain comprises immunoglobulin domains Cγ2 and Cγ3 (Cγ2 and Cγ3) and the lower hinge region between Cγ1 (Cγ1) and Cγ2 (Cγ2). Although the boundaries of the Fc region may vary, the human IgG heavy chain Fc region is usually defined to include residues C226 or P230 to its carboxyl-terminus, wherein the numbering is according to the EU index as in Kabat. In some embodiments, as is more fully described below, amino acid modifications are made to the Fc region, for example to alter binding to one or more FcγR receptors or to the FcRn receptor.

[0221] In some embodiments, the antibodies are full length. By “full length antibody” herein is meant the structure that constitutes the natural biological form of an antibody, including variable and constant regions, including one or more modifications as outlined herein.

[0222] Alternatively, the antibodies can be a variety of structures, including, but not limited to, antibody fragments, monoclonal antibodies, multispecific antibodies (as described herein, which include bi-, tri- and quadraspecific antibodies), minibodies, domain antibodies, synthetic antibodies (sometimes referred to herein as “antibody mimetics”), chimeric antibodies, humanized antibodies, antibody fusions (sometimes referred to as “antibody conjugates”), and fragments of each, respectively.

[0223] In one embodiment, the antibody is an antibody fragment, as long as it contains at least one constant domain which can be pI engineered. Specific antibody fragments include, but are not limited to, (i) the Fab fragment consisting of VL, VH, CL and CH1 domains, (ii) the Fd fragment consisting of the VH and CH1 domains, (iii) F(ab′)2 fragments, a bivalent fragment comprising two linked Fab fragments (vii) single chain Fv molecules (scFv), wherein a VH domain and a VL domain are linked by a peptide linker which allows the two domains to associate to form an antigen binding site (Bird et al., 1988, Science 242:423-426, Huston et al., 1988, Proc. Natl. Acad. Sci. U.S.A. 85:5879-5883, entirely incorporated by reference), (iv) “diabodies” or “triabodies”, multivalent or multispecific fragments constructed by gene fusion (Tomlinson et. al., 2000, Methods Enzymol. 326:461-479; WO94/13804; Holliger et al., 1993, Proc. Natl. Acad. Sci. U.S.A. 90:6444-6448, all entirely incorporated by reference).

[0224] Other antibody fragments that can be used include fragments that contain one or more of the CH1, CH2, CH3, hinge and CL domains of the invention that have been pI engineered. For example, Fc fusions are fusions of the Fc region (CH2 and CH3, optionally with the hinge region) fused to another protein. A number of Fc fusions are known the art and can be improved by the addition of the pI variants of the invention. In the present case, antibody fusions can be made comprising CH1; CH1, CH2 and CH3; CH2; CH3; CH2 and CH3; CH1 and CH3, any or all of which can be made optionally with the hinge region, utilizing any combination of pI variants described herein.

### B. Chimeric and Humanized Antibodies

[0225] In some embodiments, the antibody can be a mixture from different species, e.g. a chimeric antibody and/or a humanized antibody. In general, both “chimeric antibodies” and “humanized antibodies” refer to antibodies that combine regions from more than one species. For example, “chimeric antibodies” traditionally comprise variable region(s) from a mouse (or rat, in some cases) and the constant region(s) from a human. “Humanized antibodies” generally refer to non-human antibodies that have had the variable-domain framework regions swapped for sequences found in human antibodies. Generally, in a humanized antibody, the entire antibody, except the CDRs, is encoded by a polynucleotide of human origin or is identical to such an antibody except within its CDRs. The CDRs, some or all of which are encoded by nucleic acids originating in a non-human organism, are grafted into the beta-sheet framework of a human antibody variable region to create an antibody, the specificity of which is determined by the engrafted CDRs. The creation of such antibodies is described in, e.g., WO 92/11018, Jones, 1986, Nature 321:522-525, Verhoeyen et al., 1988, Science 239:1534-1536, all entirely incorporated by reference. “Backmutation” of selected acceptor framework residues to the corresponding donor residues is often required to regain affinity that is lost in the initial grafted construct (U.S. Pat. No. 5,530,101; U.S. Pat. No. 5,585,089; U.S. Pat. No. 5,693,761; U.S. Pat. No. 5,693,762; U.S. Pat. No. 6,180,370; U.S. Pat. No. 5,859,205; U.S. Pat. No. 5,821,337; U.S. Pat. No. 6,054,297; U.S. Pat. No. 6,407,213, all entirely incorporated by reference). The humanized antibody optimally also will comprise at least a portion of an immunoglobulin constant region, typically that of a human immunoglobulin, and thus will typically comprise a human Fc region. Humanized antibodies can also be generated using mice with a genetically engineered immune system. Roque et al., 2004, Biotechnol. Prog. 20:639-654, entirely incorporated by reference. A variety of techniques and methods for humanizing and reshaping non-human antibodies are well known in the art (See Tsurushita & Vasquez, 2004, Humanization of Monoclonal Antibodies, Molecular Biology of B Cells, 533-545, Elsevier Science (USA), and references cited therein, all entirely incorporated by reference). Humanization methods include but are not limited to methods described in Jones et al., 1986, Nature 321:522-525; Riechmann et al., 1988; Nature 332:323-329; Verhoeyen et al., 1988, Science, 239:1534-1536; Queen et al., 1989, Proc Natl Acad Sci, USA 86:10029-33; He et al., 1998, J. Immunol. 160: 1029-1035; Carter et al., 1992, Proc Natl Acad Sci USA 89:4285-9, Presta et al., 1997, Cancer Res. 57(20):4593-9; Gorman et al., 1991, Proc. Natl. Acad. Sci. USA 88:4181-4185; O'Connor et al., 1998, Protein Eng 11:321-8, all entirely incorporated by reference. Humanization or other methods of reducing the immunogenicity of nonhuman antibody variable regions may include resurfacing methods, as described for example in Roguska et al., 1994, Proc. Natl. Acad. Sci. USA 91:969-973, entirely incorporated by reference. In one embodiment, the parent antibody has been affinity matured, as is known in the art. Structure-based methods may be employed for humanization and affinity maturation, for example as described in U.S. Ser. No. 11/004,590. Selection based methods may be employed to humanize and/or affinity mature antibody variable regions, including but not limited to methods described in Wu et al., 1999, J. Mol. Biol. 294:151-162; Baca et al., 1997, J. Biol. Chem. 272(16):10678-10684; Rosok et al., 1996, J. Biol. Chem. 271(37): 22611-22618; Rader et al., 1998, Proc. Natl. Acad. Sci. USA 95: 8910-8915; Krauss et al., 2003, Protein Engineering 16(10):753-759, all entirely incorporated by reference. Other humanization methods may involve the grafting of only parts of the CDRs, including but not limited to methods described in U.S. Ser. No. 09/810,510; Tan et al., 2002, J. Immunol. 169:1119-1125; De Pascalis et al., 2002, J. Immunol. 169:3076-3084, all entirely incorporated by reference.

[0226] In one embodiment, the antibody is a minibody. Minibodies are minimized antibody-like proteins comprising a scFv joined to a CH3 domain. Hu et al., 1996, Cancer Res. 56:3055-3061, entirely incorporated by reference. In the present instance, the CH3 domain can be pI engineered. In some cases, the scFv can be joined to the Fc region, and may include some or the entire hinge region.

[0227] The antibodies of the present invention are generally isolated or recombinant. “Isolated,” when used to describe the various polypeptides disclosed herein, means a polypeptide that has been identified and separated and/or recovered from a cell or cell culture from which it was expressed. Ordinarily, an isolated polypeptide will be prepared by at least one purification step. An “isolated antibody,” refers to an antibody which is substantially free of other antibodies having different antigenic specificities.

[0228] “Specific binding” or “specifically binds to” or is “specific for” a particular antigen or an epitope means binding that is measurably different from a non-specific interaction. Specific binding can be measured, for example, by determining binding of a molecule compared to binding of a control molecule, which generally is a molecule of similar structure that does not have binding activity. For example, specific binding can be determined by competition with a control molecule that is similar to the target.

[0229] Specific binding for a particular antigen or an epitope can be exhibited, for example, by an antibody having a KD for an antigen or epitope of at least about 10⁻⁴ M, at least about 10⁻⁵ M, at least about 10⁻⁶ M, at least about 10⁻⁷ M, at least about 10⁻⁸ M, at least about 10⁻⁹ M, alternatively at least about 10⁻¹⁰ M, at least about 10⁻¹¹ M, at least about 10⁻¹² M, or greater, where KD refers to a dissociation rate of a particular antibody-antigen interaction. Typically, an antibody that specifically binds an antigen will have a KD that is 20-, 50-, 100-, 500-, 1000-, 5,000-, 10,000- or more times greater for a control molecule relative to the antigen or epitope.

[0230] Also, specific binding for a particular antigen or an epitope can be exhibited, for example, by an antibody having a KA or Ka for an antigen or epitope of at least 20-, 50-, 100-, 500-, 1000-, 5,000-, 10,000- or more times greater for the epitope relative to a control, where KA or Ka refers to an association rate of a particular antibody-antigen interaction.

### C. pI Variants

[0231] Accordingly, the present invention provides heterodimeric proteins based on the use of monomers containing variant heavy chain constant regions as a first domain. By “monomer” herein is meant one half of the heterodimeric protein. It should be noted that antibodies are actually tetrameric (two heavy chains and two light chains). In the context of the present invention, one set of heavy-light chains is considered a “monomer”. Similarly, a heavy chain constant region with a single chain Fv regions (scFv) is also considered a “monomer”. In the case where an Fv region is one fusion partner (e.g. heavy and light chain) and a non-antibody protein is another fusion partner, each “half” is considered a monomer.

[0232] The variant heavy chain constant regions can comprise all or part of the heavy chain constant region, including the full length construct, CH1-hinge-CH2-CH3, or portions thereof, including for example CH2-CH3. In addition, the heavy chain region of each monomer can be the same backbone (CH1-hinge-CH2-CH3 or CH2-CH3) or different. N- and C-terminal truncations and additions are also included within the definition; for example, some pI variants include the addition of charged amino acids to the C-terminus of the heavy chain domain (e.g. (DE)n, where n can be 1, 2, 3, etc.).

[0233] Furthermore, in addition to the pI substitutions outlined herein, the heavy chain regions may also contain additional amino acid substitutions, including changes for altering Fc binding as discussed below.

[0234] In general, as will be appreciated by those in the art, there are two general categories of pI variants: those that increase the pI of the protein (basic changes) and those that decrease the pI of the protein (acidic changes). As described herein, all combinations of these variants can be done: one monomer may be wild type, or a variant that does not display a significantly different pI from wild-type, and the other can be either more basic or more acidic. Alternatively, each monomer is changed, one to more basic and one to more acidic.

[0235] In addition, some monomers can utilize linkers between the variant heavy chain constant region and the fusion partner as is more fully outlined below. Traditional peptide linkers can be used, including flexible linkers of glycine and serine. In some cases, the linkers for use as components of the monomer are different from those defined below for the ADC constructs, and are in many embodiments not cleavable linkers (such as those susceptible to proteases), although cleavable linkers may find use in some embodiments.

[0236] Accordingly, the present invention relates to the generation of pI variants of antibodies. “pI” refers to the isoelectric point of a molecule (including both the individual amino acids and antibodies) and is the pH at which a particular molecule or surface carries no net electrical charge. In addition, the invention herein sometimes refers to changes in the “charge state” of the proteins at pH 7. That is, wild-type heavy constant region of IgG1 has a charge state of +6, while the heavy constant region of IgG2 has a charge state of 0. Variant 9493 (with a SEQ ID NO: 193 heavy chain constant domain and a SEQ ID NO:117 light chain constant domain) has 12 substitutions in both the heavy and light constant regions resulting in a charge state of −30.

[0237] The present invention relates to the generation of pI variants of antibodies to form “pI antibodies”. pI variants are made by introducing amino acid mutations into the parent molecule. “Mutations” in this context are usually amino acid substitutions, although as shown herein, deletions and insertions of amino acids can also be done and thus are defined as mutations.

[0238] By “pI variants” or “isoelectric point variants” or “pI substitutions” or grammatical equivalents thereof herein is meant a variant that has a different amino acid than the starting protein resulting in an altered pI at that position. This includes amino acid substitution(s) with a lower pI than the original (e.g. wild type) amino acid at the particular position. In some embodiments, this can also mean deleting an amino acid with a high pI (if the structure will tolerate it) or inserting amino acids with lower pIs, for example the low pI “tails” discussed below. Similarly, these pI variants can include amino acid substitution(s) with a higher pI than the original (e.g. wild type) amino acid at the particular position. In some embodiments, this can also mean deleting an amino acid with a low pI (if the structure will tolerate it) or inserting amino acids with higher pIs, for example high pI “tails” at the C-terminus, discussed below.

[0239] As shown in FIG. 36, the different amino acids have different pIs, although this figure shows the pI of amino acids as individual compositions rather than in the context of a protein, although the trend is identical. pI variants in the context of the invention are made to contribute to the decrease of the pI of the protein, in this case at least the heavy constant domain or the light constant domain of an IgG antibody, or both. An antibody engineered to include one or more of the amino acid mutations outlined herein is sometimes also referred to herein as a “pI antibody”.

[0240] In general, “pI variants” refer to one or more amino acid modifications that result in an alteration of the pI of the protein. This can be done in several ways, including substituting with an amino acid with a different pI, deleting amino acid(s), or inserting amino acid(s), thus altering the overall pI of the antibody. For example, if one heavy chain is to be altered to lower its pI, a high pI amino acid can be replaced with a lower pI or neutral amino acid, or a neutral amino acid can be replaced with a lower pI amino acid (and all combinations thereof). Similar with the engineering for increased pI chains. (As is noted below, additional non-pI variants are often added to structurally compensate for the pI variants, leading to increased stability, etc.). In the selection of constant domain positions for alteration with a lower or higher pI amino acid, the solvent accessibility of the amino acid is taken into account, although in general it is not the only factor. That is, based on the known structure of IgG molecules, and as shown in FIG. 2, each position will either be fully exposed, fully shielded (e.g. in the interior of the molecule), or partially exposed. This evaluation is shown in FIG. 2 as a “fraction exposed” of each residue in the CH1 domain and in Cκ light. In some embodiments, candidate positions for substitution with different pI amino acids are at least 50% exposed, with exposures of over 60, 70, 80+% finding use in the present invention, as well as those residues that are effectively 100% exposed.

[0241] While not shown, the same calculations can be done for the hinge region, CH2 and CH3 of the heavy chain and the CL domain of the light chain, using standard and commercially available programs to calculate the percentage exposure.

[0242] The lowering of the pI can be done in one of several ways, either replacing a higher pI amino acid (e.g. positive charge state, for example) with a neutral pI, replacing a higher pI amino acid with a lower or low pI amino acid, or replacing a neutral pI amino acid with a low pI amino acid. In some cases, when the structure allows it, deletions or insertions of one or more amino acids can also be done, e.g. deleting a high pI amino acid or inserting one or more low pI amino acids. Thus, for example, an arginine (pI 11.15) can be replaced by lysine (pI 9.59, still high but lower), a more neutral amino acid like glycine or serine, or by low pI variants such as aspartic acid or glutamic acid.

[0243] The raising of pI can be done in a similar manner, either replacing a lower pI amino acid (e.g. negative charge state, for example) with a neutral pI, replacing a lower pI amino acid with a higher or high pI amino acid, or replacing a neutral pI amino acid with a high pI amino acid. In some cases, when the structure allows it, deletions or insertions of one or more amino acids can also be done, e.g. deleting a low pI amino acid or inserting one or more high pI amino acids. Thus, for example, a lysine (pI 9.59) can be replaced with an arginine (pI 11.15) or by a more neutral amino acid like glycine or serine, or by high pI variants such as arginine and lysine.

[0244] pI variants are defined as variants by comparison to the starting or parent sequence, which frequently is the wild-type IgG constant domain (either heavy or light or both, as outlined herein). That is, the amino acid at a particular position in the wild-type is referred to as the “native” amino acid, and an amino acid substitution (or deletion or insertion) at this position is referred to as a “non-native” amino acid. For example, many embodiments herein use the IgG1 heavy chain constant region as a parent sequence in which pI mutations are made. Thus, in some embodiments, a “non-native” amino acid is as compared to the IgG1 sequence. For example, at position 119, IgG1 has a serine, and thus the non-native amino acid that can be substituted is glutamic acid. Thus, SEQ ID NO: 193 has a non-native glutamic acid at position 119. Similarly, when starting with IgG2 constant domain(s), the native and non-native amino acids are compared to the wild-type IgG2 sequence.

[0245] As will be appreciated by those in the art, it is possible to make fusions or hybrids from the various IgG molecules, as described in US Publication No. 2006/0134150, hereby incorporated by reference in its entirety for its teaching of hybrid IgGs. Thus, for example, SEQ ID NO: 28 is a hybrid IgG1/G2 molecule, and SEQ ID NO: 164 is a hybrid IgG2/G1 molecule. In this context, “non-native” or “non-wild type” substitutions means that the amino acid at the position in question is different from the parent wild-type sequence from whence that position came; that is, if the cross-over point is between amino acids 100 and 101, such that the N-terminus is from IgG1 and the C-terminus is from IgG2, a “non-native” amino acid at position 90 will be compared to the IgG1 sequence.

[0246] Thus, it is possible to use non-wild type IgG domains, e.g. IgG domains that already have variants, as the starting or parent molecule. In these cases, as above, a substitution will be “non-native” as long as it does not revert back to a wild type sequence.

### Heavy Chain pI Variants

[0247] As is described herein, some embodiments of the invention include the use of two different heavy chain pI variants, e.g. two different monomers, that come together to form a heterodimer with a different pI than either of the homodimers.

[0248] In some embodiments, the pI variants are made at least in the CH1 region of the heavy chain domain of an IgG antibody to allow the formation of the heterodimeric pI antibodies of the invention. In this embodiment, the mutations can be independently and optionally selected from position 119, 131, 133, 137, 138, 164, 192, 193, 196, 199, 203, 205, 208, 210, 214, 217 and 219. All possible combinations of these 17 positions can be made; e.g. a monomer of a pI antibody may have 1, 2, 3, 4, 5, 6, 7, 8, 9, 10, 11, 12, 13, 14, 15, 16, or 17 CH1 pI substitutions. In addition, as is described herein, any single or combination CH1 variant(s) can be combined, optionally and individually, with any CH2, CH3, hinge and/or LC variant(s) as well, and/or Fc engineering variants, independently and optionally in any combination, as is further described below.

[0249] In addition, the substitution of aspartic acid or glutamic acid at positions 121, 124, 129, 132, 134, 126, 152, 155, 157, 159, 101, 161, 162, 165, 176, 177, 178, 190, 191, 194, 195, 197, 212, 216 and 218 can be made, as shown in FIG. 2

[0250] Specific substitutions that find use in lowering the pI of CH1 domains include, but are not limited to, a non-native glutamic acid at position 119; a non-native cysteine at position 131; a non-native arginine, lysine or glutamine at position 133; a non-native glutamic acid at position 137; a non-native serine at position 138; a non-native glutamic acid at position 164; a non native asparagine at position 192; a non native phenylalanine at position 193, a non-native lysine at position 196, a non-native threonine at position 199, a non-native aspartic acid at position 203, a non-native glutamic acid or glutamine at position 205, a non native aspartic acid at position 208, a non-native glutamic acid or glutamine at position 210, a non native threonine at position 214, a non native arginine at position 217 and a non-native cysteine at position 219. As is discussed herein, these substitutions can be made individually and in any combination, with preferred combinations shown in the SEQ ID listings and described below. In some cases, only pI substitutions are done in the CH1 domain, and in others, these substitution(s) are added to other pI variants in other domains in any combination.

[11] With specific regard to human IgG1, when one monomer comprising a variant heavy chain constant domain is to be made more positive (e.g. lower the pI), one or more of the following substitutions can be made: S119E, K133E, K133Q, T164E, K205E, K205Q, N₂₀₈D, K210E, K210Q, K274E, K320E, K322E, K326E, K334E, R355E, K392E, a deletion of K447, adding peptide (DE)n, wherein n is 1, 2 or 3 (e.g. DE, DEDE, and DEDEDE) at the C-terminus, G137E, N₂₀₃D, K274Q, R355Q, K392N and Q419E. Other isotypes can be similarly altered. In the case where the heavy chain constant domain is from IgG2-4, R133E and R133Q can also be used.
[12] In addition, when one monomer comprising a variant heavy chain constant domain is to be made more negative (e.g. increase the pI), one or more of the following substitutions can be made (reference is to human IgG1 wild-type but other isotypes can be similarly done): Q196K, P217R, P228R, N276K and H435R. As outlined herein and shown in the figures, these changes are shown relative to IgG1, but all isotypes can be altered this way, as well as isotype hybrids. These changes can be individually and optionally included or excluded in any variant.

[0251] In some embodiments, mutations are made in the hinge domain, including positions 221, 222, 223, 224, 225, 233, 234, 235 and 236. It should be noted that changes in 233-236 can be made to increase effector function (along with 327A) in the IgG2 backbone. Thus, pI mutations and particularly substitutions can be made in one or more of positions 221-225, with 1, 2, 3, 4 or 5 mutations finding use in the present invention. Again, all possible combinations are contemplated, alone or with other pI variants in other domains.

[0252] Specific substitutions that find use in lowering the pI of hinge domains include, but are not limited to, a deletion at position 221, a non-native valine or threonine at position 222, a deletion at position 223, a non-native glutamic acid at position 224, a deletion at position 225, a deletion at position 235 and a deletion or a non-native alanine at position 236. Again, as above, these mutations can be made individually and in any combination, with preferred combinations shown in the SEQ ID listings and described below. In some cases, only pI substitutions are done in the hinge domain, and in others, these substitution(s) are added to other pI variants in other domains in any combination.

[0253] In some embodiments, mutations can be made in the CH2 region, including positions 274, 296, 300, 309, 320, 322, 326, 327, 334 and 339. Again, all possible combinations of these 10 positions can be made; e.g. a pI antibody may have 1, 2, 3, 4, 5, 6, 7, 8, 9 or 10 CH2 pI substitutions, any or all of which can be optionally and independently combined with other pI variants.

[0254] Specific substitutions that find use in lowering the pI of CH2 domains include, but are not limited to, a non-native glutamine or glutamic acid at position 274, a non-native phenylalanine at position 296, a non native phenylalanine at position 300, a non-native valine at position 309, a non-native glutamic acid at position 320, a non-native glutamic acid at position 322, a non-native glutamic acid at position 326, a non-native glycine at position 327, a non-native glutamic acid at position 334, a non native threonine at position 339, and all possible combinations within CH2 and with other domains.

[0255] In this embodiment, the mutations can be independently and optionally selected from position 355, 384, 392, 397, 419 and 447. All possible combinations of these 6 positions can be made; e.g. a pI antibody may have 1, 2, 3, 4, 5 or 6 CH1 pI mutations. In addition, as is described herein, any single or combination CH3 variant(s) can be combined, optionally and individually, with any CH2, CH1, hinge and LC variant(s) as well, as is further described below.

[0256] Specific substitutions that find use in lowering the pI of CH3 domains include, but are not limited to, a non native glutamine or glutamic acid at position 355, a non-native serine at position 384, a non-native asparagine or glutamic acid at position 392, a non-native methionine at position 397, a non native glutamic acid at position 419, and a deletion or non-native aspartic acid at position 447.

[0257] Thus, taken together, any possible combination of the following heavy chain constant domain mutations can be made, with each mutation being optionally included or excluded: a non-native glutamic acid at position 119; a non-native cysteine at position 131; a non-native arginine, lysine or glutamine at position 133; a non-native glutamic acid at position 137; a non-native serine at position 138; a non-native glutamic acid at position 164; a non native asparagine at position 192; a non native phenylalanine at position 193, a non-native lysine at position 196, a non-native threonine at position 199, a non-native aspartic acid at position 203, a non-native glutamic acid or glutamine at position 205, a non native aspartic acid at position 208, a non-native glutamic acid or glutamine at position 210, a non native threonine at position 214, a non native arginine at position 217 and a non-native cysteine at position 219, a deletion at position 221, a non-native valine or threonine at position 222, a deletion at position 223, a non-native glutamic acid at position 224, a deletion at position 225, a deletion at position 235, a deletion at position 221, a non-native valine or threonine at position 222, a deletion at position 223, a non-native glutamic acid at position 224, a deletion at position 225, and a deletion at position 235, a non-native glutamine or glutamic acid at position 274, a non-native phenylalanine at position 296, a non native phenylalanine at position 300, a non-native valine at position 309, a non-native glutamic acid at position 320, a non-native glutamic acid at position 322, a non-native glutamic acid at position 326, a non-native glycine at position 327, a non-native glutamic acid at position 334, a non native threonine at position 339, a non native glutamine or glutamic acid at position 355, a non-native serine at position 384, a non-native asparagine or glutamic acid at position 392, a non-native methionine at position 397, a non native glutamic acid at position 419, and a deletion or non-native aspartic acid at position 447.

[0258] Taken together, some embodiments utilize variant heavy chain domains with 0 (when the pI engineering is done in the light constant domain only), 1, 2, 3, 4, 5, 6, 7, 8, 9, 10, 11, 12, 13, 14, 15, 16, 17, 18, 19, 20, 22, 23, 26, 27, 28 and 29 mutations (as compared to IgG1) can be made, as depicted in FIG. 37.

[0259] Preferred embodiments include heterodimers comprising any combination of two different heavy chain pI variants of “ISO(−)”. “ISO(+RR)” and “ISO(+)” depicted in FIG. 52, with optional additional variants as described herein.

### Light Chain pI Variants

[0260] In some embodiments, the pI variants are made at least in the light chain domain of an IgG antibody. In this embodiment, the mutations can be independently and optionally selected from positions 126, 145, 152, 156, 169, 199, 202 and 207. All possible combinations of these 8 positions can be made; e.g. a pI antibody may have 1, 2, 3, 4, 5, 6, 7 or light constant domain pI mutations. In addition, as is described herein, any single or combination CL domain mutations can be combined with any heavy chain constant domain pI variants.

[0261] Specific mutations that find use in lowering the pI of light chain constant domains include, but are not limited to, a non-native glutamine or glutamic acid at position 126, a non-native glutamine, glutamic acid or threonine at position 145; a non-native aspartic acid at position 152, a non-native glutamic acid at position 156, a non-native glutamine or glutamic acid at position 169, a non-native glutamic acid at position 199, a non-native glutamic acid at position 202 and a a non-native glutamic acid at position 207.

[0262] In the case of antibody based heterodimers, e.g. where at least one of the monomers comprises a light chain in addition to the heavy chain domain, pI variants can also be made in the light chain. Amino acid substitutions for lowering the pI of the light chain include, but are not limited to, K126E, K126Q, K145E, K145Q, N152D, S156E, K169E, S202E, K207E and adding peptide DEDE at the c-terminus of the light chain. Changes in this category based on the constant lambda light chain include one or more substitutions at R108Q, Q124E, K126Q, N138D, K145T and Q199E. In addition, increasing the pI of the light chains can also be done.

[0263] Taken together, some embodiments utilize variant light chain domains with 0 (when the pI engineering is done in the heavy constant domain only), 1, 2, 3, 4, 5, 6, or 10 mutations (as compared to CK) can be made, as depicted in FIG. 37.

### Isotypic Variants

[0264] In addition, many embodiments of the invention rely on the “importation” of pI amino acids at particular positions from one IgG isotype into another, thus reducing or eliminating the possibility of unwanted immunogenicity being introduced into the variants. That is, IgG1 is a common isotype for therapeutic antibodies for a variety of reasons, including high effector function. However, the heavy constant region of IgG1 has a higher pI than that of IgG2 (8.10 versus 7.31). By introducing IgG2 residues at particular positions into the IgG1 backbone, the pI of the resulting monomer is lowered (or increased) and additionally exhibits longer serum half-life. For example, IgG1 has a glycine (pI 5.97) at position 137, and IgG2 has a glutamic acid (pI 3.22); importing the glutamic acid will affect the pI of the resulting protein. As is described below, a number of amino acid substitutions are generally required to significant affect the pI of the variant antibody. However, it should be noted as discussed below that even changes in IgG2 molecules allow for increased serum half-life.

[0265] In other embodiments, non-isotypic amino acid changes are made, either to reduce the overall charge state of the resulting protein (e.g. by changing a higher pI amino acid to a lower pI amino acid), or to allow accommodations in structure for stability, etc. as is more further described below.

[0266] In addition, by pI engineering both the heavy and light constant domains, significant changes in each monomer of the heterodimer can be seen. As discussed herein, having the pIs of the two monomers differ by at least 0.5 can allow separation.

### Calculating pI

[0267] The pI of each monomer can depend on the pI of the variant heavy chain constant domain and the pI of the total monomer, including the variant heavy chain constant domain and the fusion partner. Thus, in some embodiments, the change in pI is calculated on the basis of the variant heavy chain constant domain, using the chart in the Figures. Alternatively, the pI of each monomer can be compared.

### Heavy and Light Chain pI Variants

[0268] As is shown in FIG. 37, a number of pI antibodies have been generated with heavy and light chain pI variants. As outlined herein and specifically meant to be included in the present invention, any pI engineered heavy chain depicted in FIG. 37 and in the sequence listing can be combined with either a wild-type constant light domain or a pI engineered light constant domain. Similarly, an pI engineered light chain constant domain can be combined with either a wild-type constant heavy domain or a pI engineered heavy constant domain, even if not specifically present in FIG. 37. That is, the column of “HC names” and “LC names” are meant to form a matrix, with all possible combinations possible.

[0269] Thus, taken together, any possible combination of the following heavy chain constant domain mutations and light chain constant domains can be made, with each mutation being optionally included or excluded: a) heavy chain: a non-native glutamic acid at position 119; a non-native cysteine at position 131; a non-native arginine, lysine or glutamine at position 133; a non-native glutamic acid at position 137; a non-native serine at position 138; a non-native glutamic acid at position 164; a non native asparagine at position 192; a non native phenylalanine at position 193, a non-native lysine at position 196, a non-native threonine at position 199, a non-native aspartic acid at position 203, a non-native glutamic acid or glutamine at position 205, a non native aspartic acid at position 208, a non-native glutamic acid or glutamine at position 210, a non native threonine at position 214, a non native arginine at position 217 and a non-native cysteine at position 219, a deletion at position 221, a non-native valine or threonine at position 222, a deletion at position 223, a non-native glutamic acid at position 224, a deletion at position 225, a deletion at position 235, a deletion at position 221, a non-native valine or threonine at position 222, a deletion at position 223, a non-native glutamic acid at position 224, a deletion at position 225, and a deletion at position 235, a non-native glutamine or glutamic acid at position 274, a non-native phenylalanine at position 296, a non native phenylalanine at position 300, a non-native valine at position 309, a non-native glutamic acid at position 320, a non-native glutamic acid at position 322, a non-native glutamic acid at position 326, a non-native glycine at position 327, a non-native glutamic acid at position 334, a non native threonine at position 339, a non native glutamine or glutamic acid at position 355, a non-native serine at position 384, a non-native asparagine or glutamic acid at position 392, a non-native methionine at position 397, a non native glutamic acid at position 419, and a deletion or non-native aspartic acid at position 447; and b) light chain: a non-native glutamine or glutamic acid at position 126, a non-native glutamine, glutamic acid or threonine at position 145; a non-native aspartic acid at position 152, a non-native glutamic acid at position 156, a non-native glutamine or glutamic acid at position 169, a non-native glutamic acid at position 199, a non-native glutamic acid at position 202 and a a non-native glutamic acid at position 207.

[0270] Similarly, the number of mutations that can be generated in suitable pairs of heavy and light constant domains are shown in FIG. 37 (“total # of mutations” column), ranging from 1 to 37.

### Properties of the pI Antibodies of the Invention

[0271] The pI antibodies of the present invention have different heavy chain domains that have altered pIs, resulting in ease of purifying heterodimeric antibodies. In general, differences of at least 0.1 to 0.5 log (e.g. corresponding to 10% to half a pH point) allow this purification benefit, with alterations of at least about 1, 1.5, 2, 2.5 and 3 finding particular use in the invention. The pI can be either calculated or determined experimentally, as is well known in the art. In addition, it appears that pI antibodies with pIs ranging from 5. to 5.5 to 6 exhibit good extended serum half lives. As will be appreciated by those in the art and depicted in FIG. 30, pIs lower than this are difficult to achieve, as more and more mutations are required and the physical limits are reached.

[0272] In some embodiments, the pI antibodies of the present invention display increased serum half life. As shown in the Figures, surprisingly, every tested pI antibody has exhibited an increase in half life as compared to the starting molecule. While half-life is affected by a number of factors, including the Fv portion, increases of 25, 50, 75, 100, 150, 200 and 250% or more can be obtained using the pI antibodies of the present invention. As shown in FIG. 34, pI variants can increase half-life from around 4 days to over 15.

[0273] In addition, some variants herein are generated to increase stability. As noted herein, a number of properties of antibodies affect the clearance rate (e.g. stability for half-life) in vivo. In addition to antibody binding to the FcRn receptor, other factors that contribute to clearance and half-life are serum aggregation, enzymatic degradation in the serum, inherent immunogenicity of the antibody leading to clearing by the immune system, antigen-mediated uptake, FcR (non-FcRn) mediated uptake and non-serum distribution (e.g. in different tissue compartments).

[0274] Accordingly, some additional amino acid substitutions can be made that effect one or more of these properties. As shown in FIG. 37, this include, but are not limited to, 222K, 274K, 296Y, 300Y, 339A, 355R, 384N, 392K, 397V, 419Q, 296Y/300Y, 384N/392K/397V, 137G, 138G, 192S, 193L, 199I, 203N, 214K, 137G/138G, 192S/193G, 199I/203N, 214K/222K, 138G/192S/193L and 137G/138G/192S/193L.

### III. Other Amino Acid Substitutions

[0275] As will be appreciated by those in the art, the pI antibodies of the invention can contain additional amino acid substitutions in addition to the pI variants.

[0276] In some embodiments, amino acid substitutions are imported from one isotype into the pI antibody despite either a neutrality of charge state or even an increase of charge state, so as to accommodate the pI variants. These are sometimes referred to as “non-pI isotypic variants” or “accomodation variants”. For example, the replacement of the native lysine at position 133 of IgG1 with an arginine from IgG2 is such a change, as is the replacement of the native glutamine in IgG1 at position 196 with the IgG2 lysine, the replacement of native IgG1 proline at position 217 with the IgG2 arginine, etc. It should be noted in this instance that as described above, pI variants can be made at position 133 as well, substituting non-native glutamic acid or glutamine at position 133.

[0277] In the hinge region (positions 233-236), changes can be made to increase effector function. That is, IgG2 has lowered effector function, and as a result, amino acid substitutions at these positions from PVA(deletion) can be changed to ELLG, and an additional G327A variant generated as well.

[0278] In the CH3 region, a mutation at position 384 can be made, for example substituting a non-native serine.

[0279] Additional mutations that can be made include adding either N-terminal or C-terminal (depending on the structure of the antibody or fusion protein) “tails” or sequences of one or more low or high pI amino acids; for example, glutamic acids and aspartic acids can be added to the CH3 C-terminus or arginines or lysines; generally, from 1 to 5 amino acids are added, with 1, 2 and 4 being of particular use.

[0280] In some embodiments, for example for embodiments utilizing one binding site to CD3 and one to a tumor antigen (ideologically similar to the “BiTE” from Micromet), it may be desirable to knock out all binding of the Fc region to Fc gamma receptors, to decrease or eliminate effector function. In this embodiment, the incorporation of either or both 236R and 328R can be optionally and independently included or excluded in any combination of variants outlined herein.

[0281] “Knobs and Holes” Heterodimeric Variants

[0282] In addition to the pI variants discussed above, the formation of heterodimers can be facilitated by the addition of steric variants. That is, by changing amino acids in each heavy chain, different heavy chains are more likely to associate to form the heterodimeric structure than to form homodimers with the same Fc amino acid sequences. Thus again, as for the pI purification variants, these variants are meant to be used as “pairs” or “sets”, with one heavy chain being changed to include one set of substitutions and the other chain to include the corresponding set.

[0283] Thus, in addition to pI variants as discussed above, one or both variant heavy chain region can also optionally include one or more of the following variants. In one embodiment of the invention, said variant Fc regions comprise at least one substitution at a position selected from the group consisting of 349, 351, 354, 356, 357, 364, 366, 368, 370, 392, 394, 395, 396, 397, 399, 401, 405, 407, 409, 411, and 439, wherein numbering is according to the EU index as in Kabat. In a preferred embodiment, said variant Fc regions comprise at least one substitution selected from the group consisting of 349A, 349C, 349E, 349I, 349K, 349S, 349T, 349W, 351E, 351K, 354C, 356K, 357K, 364C, 364D, 364E, 364F, 364G, 364H, 364R, 364T, 364Y, 366D, 366K, 366S, 366W, 366Y, 368A, 368E, 368K, 368S, 370C, 370D, 370E, 370G, 370R, 370S, 370V, 392D, 392E, 394F, 394S, 394W, 394Y, 395T, 395V, 396T, 397E, 397S, 397T, 399K, 401K, 405A, 405S, 407T, 407V, 409D, 409E, 411D, 411E, 411K, and 439D.

[0284] In some embodiments, the steric variants outlined herein can be optionally and independently incorporated with any pI variant into a monomer.

[0285] In some embodiments, each monomer of the heterodimer is engineered to contain one or more steric variants; that is, one monomer contains at least one variant and the other monomer contains a different variant as is shown in Tables 1 and 2, below, and FIGS. 5-7 of U.S. Ser. No. 12/897,015, incorporated by reference.

[0286] Variant Fc regions for which the heterodimer content is increased over that of wild-type are preferred. Variants tested in Table 1. Preferred variant pairs are provided in Table 2:

TABLE 1
Preferred substitutions

| Variant 1 | Variant 2 |
|---|---|
| F405A | T394F |
| S364D | Y349K |
| S364E | L368K |
| S364E | Y349K |
| S364F | K370G |
| S364H | Y349K |
| S364H | Y349T |
| S364Y | K370G |
| T411K | K370E |
| V397S/F405A | T394F |
| K370R/T411K | K370E/T411E |
| L351E/S364D | Y349K/L351K |
| L351E/S364E | Y349K/L351K |
| L351E/T366D | L351K/T366K |
| P395T/V397S/F405A | T394F |
| S364D/K370G | S364Y/K370R |
| S364D/T394F | Y349K/F405A |
| S364E/F405A | Y349K/T394F |
| S364E/F405S | Y349K/T394Y |
| S364E/T411E | Y349K/D401K |
| S364H/D401K | Y349T/T411E |
| S364H/F405A | Y349T/T394F |
| S364H/T394F | Y349T/F405A |
| Y349C/S364E | Y349K/S354C |
| L351E/S364D/F405A | Y349K/L351K/T394F |
| L351K/S364H/D401K | Y349T/L351E/T411E |
| S364E/T411E/F405A | Y349K/T394F/D401K |
| S364H/D401K/F405A | Y349T/T394F/T411E |
| S364H/F405A/T411E | Y349T/T394F/D401K |

TABLE 2
Especially preferred substitutions

| Variant 1 | Variant 2 |
|---|---|
| F405A | T394F |
| S364D | Y349K |
| S364E | Y349K |
| S364H | Y349T |
| L351K | L351E |
| D401K | T411E |
| S364D/T394F | Y349K/F405A |
| S364E/F405A | Y349K/T394F |
| S364H/D401K | Y349T/T411E |
| S364H/F405A | Y349T/T394F |
| S364H/T394F | Y349T/F405A |
| L351K/S364H/D401K | Y349T/L351E/T411E |
| S364H/D401K/F405A | Y349T/T394F/T411E |
| S364H/F405A/T411E | Y349T/T394F/D401K |

### IV. Optional and Additional Fc Engineering

### FcRn Modifications

[0287] In some embodiments, the pI variants of the present invention can be combined with amino acid substitutions in the FcRn binding domain. Surprisingly, the present invention shows that pI variants can be independently and optionally combined with Fc variants that result in good bispecific formation, higher binding to the FcRn receptor as well as increased half-lives.

[0288] By “FcRn” or “neonatal Fc Receptor” as used herein is meant a protein that binds the IgG antibody Fc region and is encoded at least in part by an FcRn gene. The FcRn may be from any organism, including but not limited to humans, mice, rats, rabbits, and monkeys. As is known in the art, the functional FcRn protein comprises two polypeptides, often referred to as the heavy chain and light chain. The light chain is beta-2-microglobulin and the heavy chain is encoded by the FcRn gene. Unless other wise noted herein, FcRn or an FcRn protein refers to the complex of FcRn heavy chain with beta-2-microglobulin. In some cases, the FcRn variants bind to the human FcRn receptor, or it may be desirable to design variants that bind to rodent or primate receptors in addition, to facilitate clinical trials.

[0289] A variety of such substitutions are known and described in U.S. Ser. No. 12/341,769, hereby incorporated in its entirety and specifically for the recitation of specific variants that increase FcRn binding and/or serum half life. In some embodiments, a pI antibody can be engineered to include any of the following substitutions, alone or in any combination: 436I, 436V, 311I, 311V, 428L, 434S, 428L/434S, 259I, 308F, 259I/308F, 259I/308F/428L, 307Q/434S, 434A, 434H, 250Q/428L, M252Y/S254T/T256E, 307Q/434A, 307Q//380A/434A, and 308P/434A. Numbering is EU as in Kabat, and it is understood that the substitution is non-native to the starting molecule. As has been shown previously, these FcRn substitutions work in IgG1, IgG2 and IgG1/G2 hybrid backbones, and are specifically included for IgG3 and IgG4 backbones and derivatives of any IgG isoform as well.

[0290] In some embodiments, it is also possible to do pI engineering on variable regions, either framework or CDRs, as is generally described in US Publication 2011/0076275, expressly incorporated herein by reference.

[0291] In other embodiments, no pI variants are made in the variable region(s) of the antibodies, e.g. no amino acid substitutions are made that purposefully decrease the pI of the amino acid at a position, nor of the total protein. This is to be distinguished from affinity maturation substitutions in the variable region(s) that are made to increase binding affinity of the antibody to its antigen but may result in a lower pI amino acid being added. That is, a pI variant in the variable region(s) is generally significantly “silent” with respect to binding affinity.

### Fc Engineering

[0292] In addition to substitutions made to increase binding affinity to FcRn and/or increase serum half life, other substitutions can be made in the Fc region, in general for altering binding to FcγR receptors.

[0293] By “Fc gamma receptor”, “FcγR” or “FcgammaR” as used herein is meant any member of the family of proteins that bind the IgG antibody Fc region and is encoded by an FcγR gene. In humans this family includes but is not limited to FcγRI (CD64), including isoforms FcγRIa, FcγRIb, and FcγRIc; FcγRII (CD32), including isoforms FcγRIIa (including allotypes H131 and R131), FcγRIIb (including FcγRIIb-1 and FcγRIIb-2), and FcγRIIc; and FcγRIII (CD16), including isoforms FcγRIIIa (including allotypes V158 and F158) and FcγRIIIb (including allotypes FcγRIIIb-NA1 and FcγRIIIb-NA2) (Jefferis et al., 2002, Immunol Lett 82:57-65, entirely incorporated by reference), as well as any undiscovered human FcγRs or FcγR isoforms or allotypes. An FcγR may be from any organism, including but not limited to humans, mice, rats, rabbits, and monkeys. Mouse FcγRs include but are not limited to FcγRI (CD64), FcγRII (CD32), FcγRIII-1 (CD16), and FcγRIII-2 (CD16-2), as well as any undiscovered mouse FcγRs or FcγR isoforms or allotypes.

[0294] There are a number of useful Fc substitutions that can be made to alter binding to one or more of the FcγR receptors. Substitutions that result in increased binding as well as decreased binding can be useful. For example, it is known that increased binding to FcγRIIIa generally results in increased ADCC (antibody dependent cell-mediated cytotoxicity; the cell-mediated reaction wherein nonspecific cytotoxic cells that express FcγRs recognize bound antibody on a target cell and subsequently cause lysis of the target cell. Similarly, decreased binding to FcγRIIb (an inhibitory receptor) can be beneficial as well in some circumstances. Amino acid substitutions that find use in the present invention include those listed in U.S. Ser. Nos. 11/124,620 (particularly FIG. 41), 11/174,287, 11/396,495, 11/538,406, all of which are expressly incorporated herein by reference in their entirety and specifically for the variants disclosed therein. Particular variants that find use include, but are not limited to, 236A, 239D, 239E, 332E, 332D, 239D/332E, 267D, 267E, 328F, 267E/328F, 236A/332E, 239D/332E/330Y, 239D, 332E/330L and 299T.

### V. Other Antibody Modifications

### Affinity Maturation

[0295] In some embodiments, one or more amino acid modifications are made in one or more of the CDRs of the antibody. In general, only 1 or 2 or 3-amino acids are substituted in any single CDR, and generally no more than from 4, 5, 6, 7, 8 9 or 10 changes are made within a set of CDRs. However, it should be appreciated that any combination of no substitutions, 1, 2 or 3 substitutions in any CDR can be independently and optionally combined with any other substitution.

[0296] In some cases, amino acid modifications in the CDRs are referred to as “affinity maturation”. An “affinity matured” antibody is one having one or more alteration(s) in one or more CDRs which results in an improvement in the affinity of the antibody for antigen, compared to a parent antibody which does not possess those alteration(s). In some cases, although rare, it may be desirable to decrease the affinity of an antibody to its antigen, but this is generally not preferred.

[0297] Affinity maturation can be done to increase the binding affinity of the antibody for the antigen by at least about 10% to 50-100-150% or more, or from 1 to 5 fold as compared to the “parent” antibody. Preferred affinity matured antibodies will have nanomolar or even picomolar affinities for the target antigen. Affinity matured antibodies are produced by known procedures. See, for example, Marks et al., 1992, Biotechnology 10:779-783 that describes affinity maturation by variable heavy chain (VH) and variable light chain (VL) domain shuffling. Random mutagenesis of CDR and/or framework residues is described in: Barbas, et al. 1994, Proc. Nat. Acad. Sci, USA 91:3809-3813; Shier et al., 1995, Gene 169:147-155; Yelton et al., 1995, J. Immunol. 155:1994-2004; Jackson et al., 1995, J. Immunol. 154(7):3310-9; and Hawkins et al, 1992, J. Mol. Biol. 226:889-896, for example.

[0298] Alternatively, amino acid modifications can be made in one or more of the CDRs of the antibodies of the invention that are “silent”, e.g. that do not significantly alter the affinity of the antibody for the antigen. These can be made for a number of reasons, including optimizing expression (as can be done for the nucleic acids encoding the antibodies of the invention).

[0299] Thus, included within the definition of the CDRs and antibodies of the invention are variant CDRs and antibodies; that is, the antibodies of the invention can include amino acid modifications in one or more of the CDRs of Ab79 and Ab19. In addition, as outlined below, amino acid modifications can also independently and optionally be made in any region outside the CDRs, including framework and constant regions.

### ADC Modifications

[0300] In some embodiments, the pI antibodies of the invention are conjugated with drugs to form antibody-drug conjugates (ADCs). In general, ADCs are used in oncology applications, where the use of antibody-drug conjugates for the local delivery of cytotoxic or cytostatic agents allows for the targeted delivery of the drug moiety to tumors, which can allow higher efficacy, lower toxicity, etc. An overview of this technology is provided in Ducry et al., Bioconjugate Chem., 21:5-13 (2010), Carter et al., Cancer J. 14(3):154 (2008) and Senter, Current Opin. Chem. Biol. 13:235-244 (2009), all of which are hereby incorporated by reference in their entirety

[0301] Thus the invention provides pI antibodies conjugated to drugs. Generally, conjugation is done by covalent attachment to the antibody, as further described below, and generally relies on a linker, often a peptide linkage (which, as described below, may be designed to be sensitive to cleavage by proteases at the target site or not). In addition, as described above, linkage of the linker-drug unit (LU-D) can be done by attachment to cysteines within the antibody. As will be appreciated by those in the art, the number of drug moieties per antibody can change, depending on the conditions of the reaction, and can vary from 1:1 to 10:1 drug:antibody. As will be appreciated by those in the art, the actual number is an average.

[0302] Thus the invention provides pI antibodies conjugated to drugs. As described below, the drug of the ADC can be any number of agents, including but not limited to cytotoxic agents such as chemotherapeutic agents, growth inhibitory agents, toxins (for example, an enzymatically active toxin of bacterial, fungal, plant, or animal origin, or fragments thereof), or a radioactive isotope (that is, a radioconjugate) are provided. In other embodiments, the invention further provides methods of using the ADCs.

[0303] Drugs for use in the present invention include cytotoxic drugs, particularly those which are used for cancer therapy. Such drugs include, in general, DNA damaging agents, anti-metabolites, natural products and their analogs. Exemplary classes of cytotoxic agents include the enzyme inhibitors such as dihydrofolate reductase inhibitors, and thymidylate synthase inhibitors, DNA intercalators, DNA cleavers, topoisomerase inhibitors, the anthracycline family of drugs, the vinca drugs, the mitomycins, the bleomycins, the cytotoxic nucleosides, the pteridine family of drugs, diynenes, the podophyllotoxins, dolastatins, maytansinoids, differentiation inducers, and taxols.

[0304] Members of these classes include, for example, methotrexate, methopterin, dichloromethotrexate, 5-fluorouracil, 6-mercaptopurine, cytosine arabinoside, melphalan, leurosine, leurosideine, actinomycin, daunorubicin, doxorubicin, mitomycin C, mitomycin A, caminomycin, aminopterin, tallysomycin, podophyllotoxin and podophyllotoxin derivatives such as etoposide or etoposide phosphate, vinblastine, vincristine, vindesine, taxanes including taxol, taxotere retinoic acid, butyric acid, N8-acetyl spermidine, camptothecin, calicheamicin, esperamicin, ene-diynes, duocarmycin A, duocarmycin SA, calicheamicin, camptothecin, maytansinoids (including DM1), monomethylauristatin E (MMAE), monomethylauristatin F (MMAF), and maytansinoids (DM4) and their analogues.

[0305] Toxins may be used as antibody-toxin conjugates and include bacterial toxins such as diphtheria toxin, plant toxins such as ricin, small molecule toxins such as geldanamycin (Mandler et al (2000) J. Nat. Cancer Inst. 92(19):1573-1581; Mandler et al (2000) Bioorganic & Med. Chem. Letters 10:1025-1028; Mandler et al (2002) Bioconjugate Chem. 13:786-791), maytansinoids (EP 1391213; Liu et al., (1996) Proc. Natl. Acad. Sci. USA 93:8618-8623), and calicheamicin (Lode et al (1998) Cancer Res. 58:2928; Hinman et al (1993) Cancer Res. 53:3336-3342). Toxins may exert their cytotoxic and cytostatic effects by mechanisms including tubulin binding, DNA binding, or topoisomerase inhibition.

[0306] Conjugates of an pI antibody and one or more small molecule toxins, such as a maytansinoids, dolastatins, auristatins, a trichothecene, calicheamicin, and CC1065, and the derivatives of these toxins that have toxin activity, are contemplated.

[0307] Maytansinoids

[0308] Maytansine compounds suitable for use as maytansinoid drug moieties are well known in the art, and can be isolated from natural sources according to known methods, produced using genetic engineering techniques (see Yu et al (2002) PNAS 99:7968-7973), or maytansinol and maytansinol analogues prepared synthetically according to known methods. As described below, drugs may be modified by the incorporation of a functionally active group such as a thiol or amine group for conjugation to the antibody.

[0309] Exemplary maytansinoid drug moieties include those having a modified aromatic ring, such as: C-19-dechloro (U.S. Pat. No. 4,256,746) (prepared by lithium aluminum hydride reduction of ansamytocin P2); C-20-hydroxy (or C-20-demethyl)+/−C-19-dechloro (U.S. Pat. Nos. 4,361,650 and 4,307,016) (prepared by demethylation using Streptomyces or Actinomyces or dechlorination using LAH); and C-20-demethoxy, C-20-acyloxy (—OCOR), +/−dechloro (U.S. Pat. No. 4,294,757) (prepared by acylation using acyl chlorides) and those having modifications at other positions

[0310] Exemplary maytansinoid drug moieties also include those having modifications such as: C-9-SH (U.S. Pat. No. 4,424,219) (prepared by the reaction of maytansinol with H2S or P2S5); C-14-alkoxymethyl(demethoxy/CH2OR) (U.S. Pat. No. 4,331,598); C-14-hydroxymethyl or acyloxymethyl (CH2OH or CH2OAc) (U.S. Pat. No. 4,450,254) (prepared from Nocardia); C-15-hydroxy/acyloxy (U.S. Pat. No. 4,364,866) (prepared by the conversion of maytansinol by Streptomyces); C-15-methoxy (U.S. Pat. Nos. 4,313,946 and 4,315,929) (isolated from Trewia nudlflora); C-18-N-demethyl (U.S. Pat. Nos. 4,362,663 and 4,322,348) (prepared by the demethylation of maytansinol by Streptomyces); and 4,5-deoxy (U.S. Pat. No. 4,371,533) (prepared by the titanium trichloride/LAH reduction of maytansinol).

[0311] Of particular use are DM1 (disclosed in U.S. Pat. No. 5,208,020, incorporated by reference) and DM4 (disclosed in U.S. Pat. No. 7,276,497, incorporated by reference). See also a number of additional maytansinoid derivatives and methods in U.S. Pat. No. 5,416,064, WO/01/24763, U.S. Pat. No. 7,303,749, U.S. Pat. No. 7,601,354, U.S. Ser. No. 12/631,508, WO02/098883, U.S. Pat. No. 6,441,163, U.S. Pat. No. 7,368,565, WO02/16368 and WO04/1033272, all of which are expressly incorporated by reference in their entirety.

[0312] ADCs containing maytansinoids, methods of making same, and their therapeutic use are disclosed, for example, in U.S. Pat. Nos. 5,208,020; 5,416,064; 6,441,163 and European Patent EP 0 425 235 B1, the disclosures of which are hereby expressly incorporated by reference. Liu et al., Proc. Natl. Acad. Sci. USA 93:8618-8623 (1996) described ADCs comprising a maytansinoid designated DM1 linked to the monoclonal antibody C242 directed against human colorectal cancer. The conjugate was found to be highly cytotoxic towards cultured colon cancer cells, and showed antitumor activity in an in vivo tumor growth assay.

[0313] Chari et al., Cancer Research 52:127-131 (1992) describe ADCs in which a maytansinoid was conjugated via a disulfide linker to the murine antibody A7 binding to an antigen on human colon cancer cell lines, or to another murine monoclonal antibody TA.1 that binds the HER-2/neu oncogene. The cytotoxicity of the TA.1-maytansonoid conjugate was tested in vitro on the human breast cancer cell line SK-BR-3, which expresses 3×105 HER-2 surface antigens per cell. The drug conjugate achieved a degree of cytotoxicity similar to the free maytansinoid drug, which could be increased by increasing the number of maytansinoid molecules per antibody molecule. The A7-maytansinoid conjugate showed low systemic cytotoxicity in mice.

[0314] Auristatins and Dolastatins

[0315] In some embodiments, the ADC comprises an pI antibody conjugated to dolastatins or dolostatin peptidic analogs and derivatives, the auristatins (U.S. Pat. Nos. 5,635,483; 5,780,588). Dolastatins and auristatins have been shown to interfere with microtubule dynamics, GTP hydrolysis, and nuclear and cellular division (Woyke et al (2001) Antimicrob. Agents and Chemother. 45(12):3580-3584) and have anticancer (U.S. Pat. No. 5,663,149) and antifungal activity (Pettit et al (1998) Antimicrob. Agents Chemother. 42:2961-2965). The dolastatin or auristatin drug moiety may be attached to the antibody through the N (amino) terminus or the C (carboxyl) terminus of the peptidic drug moiety (WO 02/088172).

[0316] Exemplary auristatin embodiments include the N-terminus linked monomethylauristatin drug moieties DE and DF, disclosed in “Senter et al, Proceedings of the American Association for Cancer Research, Volume 45, Abstract Number 623, presented Mar. 28, 2004 and described in United States Patent Publication No. 2005/0238648, the disclosure of which is expressly incorporated by reference in its entirety.

[0317] An exemplary auristatin embodiment is MMAE (shown in FIG. 10 wherein the wavy line indicates the covalent attachment to a linker (L) of an antibody drug conjugate; see U.S. Pat. No. 6,884,869 expressly incorporated by reference in its entirety).

[0318] Another exemplary auristatin embodiment is MMAF, shown in FIG. 10 wherein the wavy line indicates the covalent attachment to a linker (L) of an antibody drug conjugate (US 2005/0238649, U.S. Pat. No. 5,767,237 and U.S. Pat. No. 6,124,431, expressly incorporated by reference in their entirety):

[0319] Additional exemplary embodiments comprising MMAE or MMAF and various linker components (described further herein) have the following structures and abbreviations (wherein Ab means antibody and p is 1 to about 8):

[0320] Typically, peptide-based drug moieties can be prepared by forming a peptide bond between two or more amino acids and/or peptide fragments. Such peptide bonds can be prepared, for example, according to the liquid phase synthesis method (see E. Schroder and K. Lubke, “The Peptides”, volume 1, pp 76-136, 1965, Academic Press) that is well known in the field of peptide chemistry. The auristatin/dolastatin drug moieties may be prepared according to the methods of: U.S. Pat. No. 5,635,483; U.S. Pat. No. 5,780,588; Pettit et al (1989) J. Am. Chem. Soc. 111:5463-5465; Pettit et al (1998) Anti-Cancer Drug Design 13:243-277; Pettit, G. R., et al. Synthesis, 1996, 719-725; Pettit et al (1996) J. Chem. Soc. Perkin Trans. 1 5:859-863; and Doronina (2003) Nat Biotechnol 21(7):778-784.

[0321] Calicheamicin

[0322] In other embodiments, the ADC comprises an antibody of the invention conjugated to one or more calicheamicin molecules. For example, Mylotarg is the first commercial ADC drug and utilizes calicheamicin γ1 as the payload (see U.S. Pat. No. 4,970,198, incorporated by reference in its entirety). Additional calicheamicin derivatives are described in U.S. Pat. Nos. 5,264,586, 5,384,412, 5,550,246, 5,739,116, 5,773,001, 5,767,285 and 5,877,296, all expressly incorporated by reference. The calicheamicin family of antibiotics are capable of producing double-stranded DNA breaks at sub-picomolar concentrations. For the preparation of conjugates of the calicheamicin family, see U.S. Pat. Nos. 5,712,374, 5,714,586, 5,739,116, 5,767,285, 5,770,701, 5,770,710, 5,773,001, 5,877,296 (all to American Cyanamid Company). Structural analogues of calicheamicin which may be used include, but are not limited to, γ1I, α2I, α2I, N-acetyl-γ1I, PSAG and θI1 (Hinman et al., Cancer Research 53:3336-3342 (1993), Lode et al., Cancer Research 58:2925-2928 (1998) and the aforementioned U.S. patents to American Cyanamid). Another anti-tumor drug that the antibody can be conjugated is QFA which is an antifolate. Both calicheamicin and QFA have intracellular sites of action and do not readily cross the plasma membrane. Therefore, cellular uptake of these agents through antibody mediated internalization greatly enhances their cytotoxic effects.

[0323] Duocarmycins

[0324] CC-1065 (see U.S. Pat. No. 4,169,888, incorporated by reference) and duocarmycins are members of a family of antitumor antibiotics utilized in ADCs. These antibiotics appear to work through sequence-selectively alkylating DNA at the N3 of adenine in the minor groove, which initiates a cascade of events that result in apoptosis.

[0325] Important members of the duocarmycins include duocarmycin A (U.S. Pat. No. 4,923,990, incorporated by reference) and duocarmycin SA (U.S. Pat. No. 5,101,038, incorporated by reference), and a large number of analogues as described in U.S. Pat. Nos. 7,517,903, 7,691,962, 5,101,038; 5,641,780; 5,187,186; 5,070,092; 5,070,092; 5,641,780; 5,101,038; 5,084,468, 5,475,092, 5,585,499, 5,846,545, WO2007/089149, WO2009/017394A1, U.S. Pat. No. 5,703,080, U.S. Pat. No. 6,989,452, U.S. Pat. No. 7,087,600, U.S. Pat. No. 7,129,261, U.S. Pat. No. 7,498,302, and U.S. Pat. No. 7,507,420, all of which are expressly incorporated by reference.

### VI. Other Cytotoxic Agents

[0326] Other antitumor agents that can be conjugated to the antibodies of the invention include BCNU, streptozoicin, vincristine and 5-fluorouracil, the family of agents known collectively LL-E33288 complex described in U.S. Pat. Nos. 5,053,394, 5,770,710, as well as esperamicins (U.S. Pat. No. 5,877,296).

[0327] Enzymatically active toxins and fragments thereof which can be used include diphtheria A chain, nonbinding active fragments of diphtheria toxin, exotoxin A chain (from Pseudomonas aeruginosa), ricin A chain, abrin A chain, modeccin A chain, alpha-sarcin, Aleurites fordii proteins, dianthin proteins, Phytolaca americana proteins (PAPI, PAPII, and PAP-S), momordica charantia inhibitor, curcin, crotin, sapaonaria officinalis inhibitor, gelonin, mitogellin, restrictocin, phenomycin, enomycin and the tricothecenes. See, for example, WO 93/21232 published Oct. 28, 1993.

[0328] The present invention further contemplates an ADC formed between an antibody and a compound with nucleolytic activity (e.g., a ribonuclease or a DNA endonuclease such as a deoxyribonuclease; DNase).

[0329] For selective destruction of the tumor, the antibody may comprise a highly radioactive atom. A variety of radioactive isotopes are available for the production of radioconjugated antibodies. Examples include At211, I131, I125, Y90, Re186, Re188, Sm153, Bi212, P32, Pb212 and radioactive isotopes of Lu.

[0330] The radio- or other labels may be incorporated in the conjugate in known ways. For example, the peptide may be biosynthesized or may be synthesized by chemical amino acid synthesis using suitable amino acid precursors involving, for example, fluorine-19 in place of hydrogen. Labels such as Tc99m or I123, Re186, Re188 and In111 can be attached via a cysteine residue in the peptide. Yttrium-90 can be attached via a lysine residue. The IODOGEN method (Fraker et al (1978) Biochem. Biophys. Res. Commun. 80: 49-57 can be used to incorporate Iodine-123. “Monoclonal Antibodies in Immunoscintigraphy” (Chatal, CRC Press 1989) describes other methods in detail.

[0331] For compositions comprising a plurality of antibodies, the drug loading is represented by p, the average number of drug molecules per Antibody. Drug loading may range from 1 to 20 drugs (D) per Antibody. The average number of drugs per antibody in preparation of conjugation reactions may be characterized by conventional means such as mass spectroscopy, ELISA assay, and HPLC. The quantitative distribution of Antibody-Drug-Conjugates in terms of p may also be determined.

[0332] In some instances, separation, purification, and characterization of homogeneous Antibody-Drug-conjugates where p is a certain value from Antibody-Drug-Conjugates with other drug loadings may be achieved by means such as reverse phase HPLC or electrophoresis. In exemplary embodiments, p is 2, 3, 4, 5, 6, 7, or 8 or a fraction thereof.

[0333] The generation of Antibody-drug conjugate compounds can be accomplished by any technique known to the skilled artisan. Briefly, the Antibody-drug conjugate compounds can include an pI antibody as the Antibody unit, a drug, and optionally a linker that joins the drug and the binding agent.

[0334] A number of different reactions are available for covalent attachment of drugs and/or linkers to binding agents. This is can be accomplished by reaction of the amino acid residues of the binding agent, for example, antibody molecule, including the amine groups of lysine, the free carboxylic acid groups of glutamic and aspartic acid, the sulfhydryl groups of cysteine and the various moieties of the aromatic amino acids. A commonly used non-specific methods of covalent attachment is the carbodiimide reaction to link a carboxy (or amino) group of a compound to amino (or carboxy) groups of the antibody. Additionally, bifunctional agents such as dialdehydes or imidoesters have been used to link the amino group of a compound to amino groups of an antibody molecule.

[0335] Also available for attachment of drugs to binding agents is the Schiff base reaction. This method involves the periodate oxidation of a drug that contains glycol or hydroxy groups, thus forming an aldehyde which is then reacted with the binding agent. Attachment occurs via formation of a Schiff base with amino groups of the binding agent. Isothiocyanates can also be used as coupling agents for covalently attaching drugs to binding agents. Other techniques are known to the skilled artisan and within the scope of the present invention.

[0336] In some embodiments, an intermediate, which is the precursor of the linker, is reacted with the drug under appropriate conditions. In other embodiments, reactive groups are used on the drug and/or the intermediate. The product of the reaction between the drug and the intermediate, or the derivatized drug, is subsequently reacted with an pI antibody of the invention under appropriate conditions.

[0337] It will be understood that chemical modifications may also be made to the desired compound in order to make reactions of that compound more convenient for purposes of preparing conjugates of the invention. For example a functional group e.g. amine, hydroxyl, or sulfhydryl, may be appended to the drug at a position which has minimal or an acceptable effect on the activity or other properties of the drug

### VII. Linker Units

[0338] Typically, the antibody-drug conjugate compounds comprise a Linker unit between the drug unit and the antibody unit. In some embodiments, the linker is cleavable under intracellular or extracellular conditions, such that cleavage of the linker releases the drug unit from the antibody in the appropriate environment. For example, solid tumors that secrete certain proteases may serve as the target of the cleavable linker; in other embodiments, it is the intracellular proteases that are utilized. In yet other embodiments, the linker unit is not cleavable and the drug is released, for example, by antibody degradation in lysosomes.

[0339] In some embodiments, the linker is cleavable by a cleaving agent that is present in the intracellular environment (for example, within a lysosome or endosome or caveolea). The linker can be, for example, a peptidyl linker that is cleaved by an intracellular peptidase or protease enzyme, including, but not limited to, a lysosomal or endosomal protease. In some embodiments, the peptidyl linker is at least two amino acids long or at least three amino acids long or more.

[0340] Cleaving agents can include, without limitation, cathepsins B and D and plasmin, all of which are known to hydrolyze dipeptide drug derivatives resulting in the release of active drug inside target cells (see, e.g., Dubowchik and Walker, 1999, Pharm. Therapeutics 83:67-123). Peptidyl linkers that are cleavable by enzymes that are present in CD38-expressing cells. For example, a peptidyl linker that is cleavable by the thiol-dependent protease cathepsin-B, which is highly expressed in cancerous tissue, can be used (e.g., a Phe-Leu or a Gly-Phe-Leu-Gly linker (SEQ ID NO: X)). Other examples of such linkers are described, e.g., in U.S. Pat. No. 6,214,345, incorporated herein by reference in its entirety and for all purposes.

[0341] In some embodiments, the peptidyl linker cleavable by an intracellular protease is a Val-Cit linker or a Phe-Lys linker (see, e.g., U.S. Pat. No. 6,214,345, which describes the synthesis of doxorubicin with the val-cit linker).

[0342] In other embodiments, the cleavable linker is pH-sensitive, that is, sensitive to hydrolysis at certain pH values. Typically, the pH-sensitive linker hydrolyzable under acidic conditions. For example, an acid-labile linker that is hydrolyzable in the lysosome (for example, a hydrazone, semicarbazone, thiosemicarbazone, cis-aconitic amide, orthoester, acetal, ketal, or the like) may be used. (See, e.g., U.S. Pat. Nos. 5,122,368; 5,824,805; 5,622,929; Dubowchik and Walker, 1999, Pharm. Therapeutics 83:67-123; Neville et al., 1989, Biol. Chem. 264:14653-14661.) Such linkers are relatively stable under neutral pH conditions, such as those in the blood, but are unstable at below pH 5.5 or 5.0, the approximate pH of the lysosome. In certain embodiments, the hydrolyzable linker is a thioether linker (such as, e.g., a thioether attached to the therapeutic agent via an acylhydrazone bond (see, e.g., U.S. Pat. No. 5,622,929).

[0343] In yet other embodiments, the linker is cleavable under reducing conditions (for example, a disulfide linker). A variety of disulfide linkers are known in the art, including, for example, those that can be formed using SATA (N-succinimidyl-5-acetylthioacetate), SPDP (N-succinimidyl-3-(2-pyridyldithio)propionate), SPDB (N-succinimidyl-3-(2-pyridyldithio)butyrate) and SMPT (N-succinimidyl-oxycarbonyl-alpha-methyl-alpha-(2-pyridyl-dithio)toluene)-, SPDB and SMPT. (See, e.g., Thorpe et al., 1987, Cancer Res. 47:5924-5931; Wawrzynczak et al., In Immunoconjugates: Antibody Conjugates in Radioimagery and Therapy of Cancer (C. W. Vogel ed., Oxford U. Press, 1987. See also U.S. Pat. No. 4,880,935.)

[0344] In other embodiments, the linker is a malonate linker (Johnson et al., 1995, Anticancer Res. 15:1387-93), a maleimidobenzoyl linker (Lau et al., 1995, Bioorg-Med-Chem. 3(10):1299-1304), or a 3′-N-amide analog (Lau et al., 1995, Bioorg-Med-Chem. 3(10):1305-12).

[0345] In yet other embodiments, the linker unit is not cleavable and the drug is released by antibody degradation. (See U.S. Publication No. 2005/0238649 incorporated by reference herein in its entirety and for all purposes).

[0346] In many embodiments, the linker is self-immolative. As used herein, the term “self-immolative Spacer” refers to a bifunctional chemical moiety that is capable of covalently linking together two spaced chemical moieties into a stable tripartite molecule. It will spontaneously separate from the second chemical moiety if its bond to the first moiety is cleaved. See for example, WO 2007059404A2, WO06110476A2, WO05112919A2, WO2010/062171, WO09/017,394, WO07/089,149, WO 07/018,431, WO04/043493 and WO02/083180, which are directed to drug-cleavable substrate conjugates where the drug and cleavable substrate are optionally linked through a self-immolative linker and which are all expressly incorporated by reference.

[0347] Often the linker is not substantially sensitive to the extracellular environment. As used herein, “not substantially sensitive to the extracellular environment,” in the context of a linker, means that no more than about 20%, 15%, 10%, 5%, 3%, or no more than about 1% of the linkers, in a sample of antibody-drug conjugate compound, are cleaved when the antibody-drug conjugate compound presents in an extracellular environment (for example, in plasma).

[0348] Whether a linker is not substantially sensitive to the extracellular environment can be determined, for example, by incubating with plasma the antibody-drug conjugate compound for a predetermined time period (for example, 2, 4, 8, 16, or 24 hours) and then quantitating the amount of free drug present in the plasma.

[0349] In other, non-mutually exclusive embodiments, the linker promotes cellular internalization. In certain embodiments, the linker promotes cellular internalization when conjugated to the therapeutic agent (that is, in the milieu of the linker-therapeutic agent moiety of the antibody-drug conjugate compound as described herein). In yet other embodiments, the linker promotes cellular internalization when conjugated to both the auristatin compound and the pI antibodies of the invention.

[0350] A variety of exemplary linkers that can be used with the present compositions and methods are described in WO 2004-010957, U.S. Publication No. 2006/0074008, U.S. Publication No. 20050238649, and U.S. Publication No. 2006/0024317 (each of which is incorporated by reference herein in its entirety and for all purposes).

### VIII. Drug Loading

[0351] Drug loading is represented by p and is the average number of Drug moieties per antibody in a molecule. Drug loading (“p”) may be 1, 2, 3, 4, 5, 6, 7, 8, 9, 10, 11, 12, 13, 14, 15, 16, 17, 18, 19, 20 or more moieties (D) per antibody, although frequently the average number is a fraction or a decimal. Generally, drug loading of from 1 to 4 is frequently useful, and from 1 to 2 is also useful. ADCs of the invention include collections of antibodies conjugated with a range of drug moieties, from 1 to 20. The average number of drug moieties per antibody in preparations of ADC from conjugation reactions may be characterized by conventional means such as mass spectroscopy and, ELISA assay.

[0352] The quantitative distribution of ADC in terms of p may also be determined. In some instances, separation, purification, and characterization of homogeneous ADC where p is a certain value from ADC with other drug loadings may be achieved by means such as electrophoresis.

[0353] For some antibody-drug conjugates, p may be limited by the number of attachment sites on the antibody. For example, where the attachment is a cysteine thiol, as in the exemplary embodiments above, an antibody may have only one or several cysteine thiol groups, or may have only one or several sufficiently reactive thiol groups through which a linker may be attached. In certain embodiments, higher drug loading, e.g. p>5, may cause aggregation, insolubility, toxicity, or loss of cellular permeability of certain antibody-drug conjugates. In certain embodiments, the drug loading for an ADC of the invention ranges from 1 to about 8; from about 2 to about 6; from about 3 to about 5; from about 3 to about 4; from about 3.1 to about 3.9; from about 3.2 to about 3.8; from about 3.2 to about 3.7; from about 3.2 to about 3.6; from about 3.3 to about 3.8; or from about 3.3 to about 3.7. Indeed, it has been shown that for certain ADCs, the optimal ratio of drug moieties per antibody may be less than 8, and may be about 2 to about 5. See US 2005-0238649 A1 (herein incorporated by reference in its entirety).

[0354] In certain embodiments, fewer than the theoretical maximum of drug moieties are conjugated to an antibody during a conjugation reaction. An antibody may contain, for example, lysine residues that do not react with the drug-linker intermediate or linker reagent, as discussed below. Generally, antibodies do not contain many free and reactive cysteine thiol groups which may be linked to a drug moiety; indeed most cysteine thiol residues in antibodies exist as disulfide bridges. In certain embodiments, an antibody may be reduced with a reducing agent such as dithiothreitol (DTT) or tricarbonylethylphosphine (TCEP), under partial or total reducing conditions, to generate reactive cysteine thiol groups. In certain embodiments, an antibody is subjected to denaturing conditions to reveal reactive nucleophilic groups such as lysine or cysteine.

[0355] The loading (drug/antibody ratio) of an ADC may be controlled in different ways, e.g., by: (i) limiting the molar excess of drug-linker intermediate or linker reagent relative to antibody, (ii) limiting the conjugation reaction time or temperature, (iii) partial or limiting reductive conditions for cysteine thiol modification, (iv) engineering by recombinant techniques the amino acid sequence of the antibody such that the number and position of cysteine residues is modified for control of the number and/or position of linker-drug attachements (such as thioMab or thioFab prepared as disclosed herein and in WO2006/034488 (herein incorporated by reference in its entirety)).

[0356] It is to be understood that where more than one nucleophilic group reacts with a drug-linker intermediate or linker reagent followed by drug moiety reagent, then the resulting product is a mixture of ADC compounds with a distribution of one or more drug moieties attached to an antibody. The average number of drugs per antibody may be calculated from the mixture by a dual ELISA antibody assay, which is specific for antibody and specific for the drug. Individual ADC molecules may be identified in the mixture by mass spectroscopy and separated by HPLC, e.g. hydrophobic interaction chromatography.

[0357] In some embodiments, a homogeneous ADC with a single loading value may be isolated from the conjugation mixture by electrophoresis or chromatography.

### Methods of Determining Cytotoxic Effect of ADCs

[0358] Methods of determining whether a Drug or Antibody-Drug conjugate exerts a cytostatic and/or cytotoxic effect on a cell are known. Generally, the cytotoxic or cytostatic activity of an Antibody Drug conjugate can be measured by: exposing mammalian cells expressing a target protein of the Antibody Drug conjugate in a cell culture medium; culturing the cells for a period from about 6 hours to about 5 days; and measuring cell viability. Cell-based in vitro assays can be used to measure viability (proliferation), cytotoxicity, and induction of apoptosis (caspase activation) of the Antibody Drug conjugate.

[0359] For determining whether an Antibody Drug conjugate exerts a cytostatic effect, a thymidine incorporation assay may be used. For example, cancer cells expressing a target antigen at a density of 5,000 cells/well of a 96-well plated can be cultured for a 72-hour period and exposed to 0.5 μCi of ³H-thymidine during the final 8 hours of the 72-hour period. The incorporation of ³H-thymidine into cells of the culture is measured in the presence and absence of the Antibody Drug conjugate.

[0360] For determining cytotoxicity, necrosis or apoptosis (programmed cell death) can be measured. Necrosis is typically accompanied by increased permeability of the plasma membrane; swelling of the cell, and rupture of the plasma membrane. Apoptosis is typically characterized by membrane blebbing, condensation of cytoplasm, and the activation of endogenous endonucleases. Determination of any of these effects on cancer cells indicates that an Antibody Drug conjugate is useful in the treatment of cancers.

[0361] Cell viability can be measured by determining in a cell the uptake of a dye such as neutral red, trypan blue, or ALAMAR™ blue (see, e.g., Page et al., 1993, Intl. J. Oncology 3:473-476). In such an assay, the cells are incubated in media containing the dye, the cells are washed, and the remaining dye, reflecting cellular uptake of the dye, is measured spectrophotometrically. The protein-binding dye sulforhodamine B (SRB) can also be used to measure cytoxicity (Skehan et al., 1990, J. Natl. Cancer Inst. 82:1107-12).

[0362] Alternatively, a tetrazolium salt, such as MTT, is used in a quantitative colorimetric assay for mammalian cell survival and proliferation by detecting living, but not dead, cells (see, e.g., Mosmann, 1983, J. Immunol. Methods 65:55-63).

[0363] Apoptosis can be quantitated by measuring, for example, DNA fragmentation. Commercial photometric methods for the quantitative in vitro determination of DNA fragmentation are available. Examples of such assays, including TUNEL (which detects incorporation of labeled nucleotides in fragmented DNA) and ELISA-based assays, are described in Biochemica, 1999, no. 2, pp. 34-37 (Roche Molecular Biochemicals).

[0364] Apoptosis can also be determined by measuring morphological changes in a cell. For example, as with necrosis, loss of plasma membrane integrity can be determined by measuring uptake of certain dyes (e.g., a fluorescent dye such as, for example, acridine orange or ethidium bromide). A method for measuring apoptotic cell number has been described by Duke and Cohen, Current Protocols in Immunology (Coligan et al. eds., 1992, pp. 3.17.1-3.17.16). Cells also can be labeled with a DNA dye (e.g., acridine orange, ethidium bromide, or propidium iodide) and the cells observed for chromatin condensation and margination along the inner nuclear membrane. Other morphological changes that can be measured to determine apoptosis include, e.g., cytoplasmic condensation, increased membrane blebbing, and cellular shrinkage.

[0365] The presence of apoptotic cells can be measured in both the attached and “floating” compartments of the cultures. For example, both compartments can be collected by removing the supernatant, trypsinizing the attached cells, combining the preparations following a centrifugation wash step (e.g., 10 minutes at 2000 rpm), and detecting apoptosis (e.g., by measuring DNA fragmentation). (See, e.g., Piazza et al., 1995, Cancer Research 55:3110-16).

[0366] In vivo, the effect of a therapeutic composition of the pI antibody of the invention can be evaluated in a suitable animal model. For example, xenogenic cancer models can be used, wherein cancer explants or passaged xenograft tissues are introduced into immune compromised animals, such as nude or SCID mice (Klein et al., 1997, Nature Medicine 3: 402-408). Efficacy can be measured using assays that measure inhibition of tumor formation, tumor regression or metastasis, and the like.

[0367] The therapeutic compositions used in the practice of the foregoing methods can be formulated into pharmaceutical compositions comprising a carrier suitable for the desired delivery method. Suitable carriers include any material that when combined with the therapeutic composition retains the anti-tumor function of the therapeutic composition and is generally non-reactive with the patient's immune system. Examples include, but are not limited to, any of a number of standard pharmaceutical carriers such as sterile phosphate buffered saline solutions, bacteriostatic water, and the like (see, generally, Remington's Pharmaceutical Sciences 16^{th} Edition, A. Osal., Ed., 1980).

[0368] Glycosylation

[0369] Another type of covalent modification is alterations in glycosylation. In another embodiment, the antibodies disclosed herein can be modified to include one or more engineered glycoforms. By “engineered glycoform” as used herein is meant a carbohydrate composition that is covalently attached to the antibody, wherein said carbohydrate composition differs chemically from that of a parent antibody. Engineered glycoforms may be useful for a variety of purposes, including but not limited to enhancing or reducing effector function. A preferred form of engineered glycoform is afucosylation, which has been shown to be correlated to an increase in ADCC function, presumably through tighter binding to the FcγRIIIa receptor. In this context, “afucosylation” means that the majority of the antibody produced in the host cells is substantially devoid of fucose, e.g. 90-95-98% of the generated antibodies do not have appreciable fucose as a component of the carbohydrate moiety of the antibody (generally attached at N297 in the Fc region). Defined functionally, afucosylated antibodies generally exhibit at least a 50% or higher affinity to the FcγRIIIa receptor.

[0370] Engineered glycoforms may be generated by a variety of methods known in the art (Umaña et al., 1999, Nat Biotechnol 17:176-180; Davies et al., 2001, Biotechnol Bioeng 74:288-294; Shields et al., 2002, J Biol Chem 277:26733-26740; Shinkawa et al., 2003, J Biol Chem 278:3466-3473; U.S. Pat. No. 6,602,684; U.S. Ser. No. 10/277,370; U.S. Ser. No. 10/113,929; PCT WO 00/61739A1; PCT WO 01/29246A1; PCT WO 02/31140A1; PCT WO 02/30954A1, all entirely incorporated by reference; (Potelligent® technology [Biowa, Inc., Princeton, N.J.]; GlycoMAb® glycosylation engineering technology [Glycart Biotechnology AG, Zürich, Switzerland]). Many of these techniques are based on controlling the level of fucosylated and/or bisecting oligosaccharides that are covalently attached to the Fc region, for example by expressing an IgG in various organisms or cell lines, engineered or otherwise (for example Lec-13 CHO cells or rat hybridoma YB2/0 cells, by regulating enzymes involved in the glycosylation pathway (for example FUT8 [α-1,6-fucosyltranserase] and/or β1-4-N-acetylglucosaminyltransferase III [GnTIII]), or by modifying carbohydrate(s) after the IgG has been expressed. For example, the “sugar engineered antibody” or “SEA technology” of Seattle Genetics functions by adding modified saccharides that inhibit fucosylation during production; see for example 20090317869, hereby incorporated by reference in its entirety. Engineered glycoform typically refers to the different carbohydrate or oligosaccharide; thus an antibody can include an engineered glycoform.

[0371] Alternatively, engineered glycoform may refer to the IgG variant that comprises the different carbohydrate or oligosaccharide. As is known in the art, glycosylation patterns can depend on both the sequence of the protein (e.g., the presence or absence of particular glycosylation amino acid residues, discussed below), or the host cell or organism in which the protein is produced. Particular expression systems are discussed below.

[0372] Glycosylation of polypeptides is typically either N-linked or O-linked. N-linked refers to the attachment of the carbohydrate moiety to the side chain of an asparagine residue. The tri-peptide sequences asparagine-X-serine and asparagine-X-threonine, where X is any amino acid except proline, are the recognition sequences for enzymatic attachment of the carbohydrate moiety to the asparagine side chain. Thus, the presence of either of these tri-peptide sequences in a polypeptide creates a potential glycosylation site. O-linked glycosylation refers to the attachment of one of the sugars N-acetylgalactosamine, galactose, or xylose, to a hydroxyamino acid, most commonly serine or threonine, although 5-hydroxyproline or 5-hydroxylysine may also be used.

[0373] Addition of glycosylation sites to the antibody is conveniently accomplished by altering the amino acid sequence such that it contains one or more of the above-described tri-peptide sequences (for N-linked glycosylation sites). The alteration may also be made by the addition of, or substitution by, one or more serine or threonine residues to the starting sequence (for O-linked glycosylation sites). For ease, the antibody amino acid sequence is preferably altered through changes at the DNA level, particularly by mutating the DNA encoding the target polypeptide at preselected bases such that codons are generated that will translate into the desired amino acids.

[0374] Another means of increasing the number of carbohydrate moieties on the antibody is by chemical or enzymatic coupling of glycosides to the protein. These procedures are advantageous in that they do not require production of the protein in a host cell that has glycosylation capabilities for N- and O-linked glycosylation. Depending on the coupling mode used, the sugar(s) may be attached to (a) arginine and histidine, (b) free carboxyl groups, (c) free sulfhydryl groups such as those of cysteine, (d) free hydroxyl groups such as those of serine, threonine, or hydroxyproline, (e) aromatic residues such as those of phenylalanine, tyrosine, or tryptophan, or (f) the amide group of glutamine. These methods are described in WO 87/05330 and in Aplin and Wriston, 1981, CRC Crit. Rev. Biochem., pp. 259-306, both entirely incorporated by reference.

[0375] Removal of carbohydrate moieties present on the starting antibody (e.g. post-translationally) may be accomplished chemically or enzymatically. Chemical deglycosylation requires exposure of the protein to the compound trifluoromethanesulfonic acid, or an equivalent compound. This treatment results in the cleavage of most or all sugars except the linking sugar (N-acetylglucosamine or N-acetylgalactosamine), while leaving the polypeptide intact. Chemical deglycosylation is described by Hakimuddin et al., 1987, Arch. Biochem. Biophys. 259:52 and by Edge et al., 1981, Anal. Biochem. 118:131, both entirely incorporated by reference. Enzymatic cleavage of carbohydrate moieties on polypeptides can be achieved by the use of a variety of endo- and exo-glycosidases as described by Thotakura et al., 1987, Meth. Enzymol. 138:350, entirely incorporated by reference. Glycosylation at potential glycosylation sites may be prevented by the use of the compound tunicamycin as described by Duskin et al., 1982, J. Biol. Chem. 257:3105, entirely incorporated by reference. Tunicamycin blocks the formation of protein-N-glycoside linkages.

[0376] Another type of covalent modification of the antibody comprises linking the antibody to various nonproteinaceous polymers, including, but not limited to, various polyols such as polyethylene glycol, polypropylene glycol or polyoxyalkylenes, in the manner set forth in, for example, 2005-2006 PEG Catalog from Nektar Therapeutics (available at the Nektar website) U.S. Pat. Nos. 4,640,835; 4,496,689; 4,301,144; 4,670,417; 4,791,192 or 4,179,337, all entirely incorporated by reference. In addition, as is known in the art, amino acid substitutions may be made in various positions within the antibody to facilitate the addition of polymers such as PEG. See for example, U.S. Publication No. 2005/0114037A1, entirely incorporated by reference.

### Nucleic Acids and Host Cells

[0377] Included within the invention are the nucleic acids encoding the pI antibodies of the invention. In the case where both a heavy and light chain constant domains are included in the pI antibody, generally these are made using nucleic acids encoding each, that are combined into standard host cells (e.g. CHO cells, etc.) to produce the tetrameric structure of the antibody. If only one pI engineered constant domain is being made, only a single nucleic acid will be used.

[0378] Targets

[0379] As will be appreciated by those in the art, a wide variant of antigen binding domains, e.g. Fv regions, may find use in the present invention. Virtually any antigen may be targeted by the IgG variants, including but not limited to proteins, subunits, domains, motifs, and/or epitopes belonging to the following list of target antigens, which includes both soluble factors such as cytokines and membrane-bound factors, including transmembrane receptors: 17-IA, 4-1BB, 4Dc, 6-keto-PGF1a, 8-iso-PGF2a, 8-oxo-dG, A1 Adenosine Receptor, A33, ACE, ACE-2, Activin, Activin A, Activin AB, Activin B, Activin C, Activin RIA, Activin RIA ALK-2, Activin RIB ALK-4, Activin RIIA, Activin RIIB, ADAM, ADAM10, ADAM12, ADAM15, ADAM17/TACE, ADAM8, ADAM9, ADAMTS, ADAMTS4, ADAMTS5, Addressins, aFGF, ALCAM, ALK, ALK-1, ALK-7, alpha-1-antitrypsin, alpha-V/beta-1 antagonist, ANG, Ang, APAF-1, APE, APJ, APP, APRIL, AR, ARC, ART, Artemin, anti-Id, ASPARTIC, Atrial natriuretic factor, av/b3 integrin, Axl, b2M, B7-1, B7-2, B7-H, B-lymphocyte Stimulator (BlyS), BACE, BACE-1, Bad, BAFF, BAFF-R, Bag-1, BAK, Bax, BCA-1, BCAM, Bcl, BCMA, BDNF, b-ECGF, bFGF, BID, Bik, BIM, BLC, BL-CAM, BLK, BMP, BMP-2 BMP-2a, BMP-3 Osteogenin, BMP-4 BMP-2b, BMP-5, BMP-6 Vgr-1, BMP-7 (OP-1), BMP-8 (BMP-8a, OP-2), BMPR, BMPR-IA (ALK-3), BMPR-IB (ALK-6), BRK-2, RPK-1, BMPR-II (BRK-3), BMPs, b-NGF, BOK, Bombesin, Bone-derived neurotrophic factor, BPDE, BPDE-DNA, BTC, complement factor 3 (C3), C3a, C4, C5, C5a, C10, CA125, CAD-8, Calcitonin, cAMP, carcinoembryonic antigen (CEA), carcinoma-associated antigen, Cathepsin A, Cathepsin B, Cathepsin C/DPPI, Cathepsin D, Cathepsin E, Cathepsin H, Cathepsin L, Cathepsin O, Cathepsin S, Cathepsin V, Cathepsin X/Z/P, CBL, CCI, CCK2, CCL, CCL1, CCL11, CCL12, CCL13, CCL14, CCL15, CCL16, CCL17, CCL18, CCL19, CCL2, CCL20, CCL21, CCL22, CCL23, CCL24, CCL25, CCL26, CCL27, CCL28, CCL3, CCL4, CCL5, CCL6, CCL7, CCL8, CCL9/10, CCR, CCR1, CCR10, CCR10, CCR2, CCR3, CCR4, CCR5, CCR6, CCR7, CCR8, CCR9, CD1, CD2, CD3, CD3E, CD4, CD5, CD6, CD7, CD8, CD10, CD11a, CD11b, CD11c, CD13, CD14, CD15, CD16, CD18, CD19, CD20, CD21, CD22, CD23, CD25, CD27L, CD28, CD29, CD30, CD30L, CD32, CD33 (p67 proteins), CD34, CD38, CD40, CD40L, CD44, CD45, CD46, CD49a, CD52, CD54, CD55, CD56, CD61, CD64, CD66e, CD74, CD80 (B7-1), CD89, CD95, CD123, CD137, CD138, CD140a, CD146, CD147, CD148, CD152, CD164, CEACAM5, CFTR, cGMP, CINC, Clostridium botulinum toxin, Clostridium perfringens toxin, CKb8-1, CLC, CMV, CMV UL, CNTF, CNTN-1, COX, C-Ret, CRG-2, CT-1, CTACK, CTGF, CTLA-4, CX3CL1, CX3CR1, CXCL, CXCL1, CXCL2, CXCL3, CXCL4, CXCL5, CXCL6, CXCL7, CXCL8, CXCL9, CXCL10, CXCL11, CXCL12, CXCL13, CXCL14, CXCL15, CXCL16, CXCR, CXCR1, CXCR2, CXCR3, CXCR4, CXCR5, CXCR6, cytokeratin tumor-associated antigen, DAN, DCC, DcR3, DC-SIGN, Decay accelerating factor, des(1-3)-IGF-I (brain IGF-1), Dhh, digoxin, DNAM-1, Dnase, Dpp, DPPIV/CD26, Dtk, ECAD, EDA, EDA-A1, EDA-A2, EDAR, EGF, EGFR (ErbB-1), EMA, EMMPRIN, ENA, endothelin receptor, Enkephalinase, eNOS, Eot, eotaxin1, EpCAM, Ephrin B2/EphB4, EPO, ERCC, E-selectin, ET-1, Factor IIa, Factor VII, Factor VIIIc, Factor IX, fibroblast activation protein (FAP), Fas, FcR1, FEN-1, Ferritin, FGF, FGF-19, FGF-2, FGF3, FGF-8, FGFR, FGFR-3, Fibrin, FL, FLIP, Flt-3, Flt-4, Follicle stimulating hormone, Fractalkine, FZD1, FZD2, FZD3, FZD4, FZD5, FZD6, FZD7, FZD8, FZD9, FZD10, G250, Gas 6, GCP-2, GCSF, GD2, GD3, GDF, GDF-1, GDF-3 (Vgr-2), GDF-5 (BMP-14, CDMP-1), GDF-6 (BMP-13, CDMP-2), GDF-7 (BMP-12, CDMP-3), GDF-8 (Myostatin), GDF-9, GDF-15 (MIC-1), GDNF, GDNF, GFAP, GFRa-1, GFR-alpha1, GFR-alpha2, GFR-alpha3, GITR, Glucagon, Glut 4, glycoprotein IIb/IIIa (GP IIb/IIIa), GM-CSF, gp130, gp72, GRO, Growth hormone releasing factor, Hapten (NP-cap or NIP-cap), HB-EGF, HCC, HCMV gB envelope glycoprotein, HCMV) gH envelope glycoprotein, HCMV UL, Hemopoietic growth factor (HGF), Hep B gp120, heparanase, Her2, Her2/neu (ErbB-2), Her3 (ErbB-3), Her4 (ErbB-4), herpes simplex virus (HSV) gB glycoprotein, HSV gD glycoprotein, HGFA, High molecular weight melanoma-associated antigen (HMW-MAA), HIV gp120, HIV IIIB gp120 V3 loop, HLA, HLA-DR, HM1.24, HMFG PEM, HRG, Hrk, human cardiac myosin, human cytomegalovirus (HCMV), human growth hormone (HGH), HVEM, 1-309, IAP, ICAM, ICAM-1, ICAM-3, ICE, ICOS, IFNg, Ig, IgA receptor, IgE, IGF, IGF binding proteins, IGF-1R, IGFBP, IGF-I, IGF-II, IL, IL-1, IL-1R, IL-2, IL-2R, IL-4, IL-4R, IL-5, IL-5R, IL-6, IL-6R, IL-8, IL-9, IL-10, IL-12, IL-13, IL-15, IL-18, IL-18R, IL-23, interferon (INF)-alpha, INF-beta, INF-gamma, Inhibin, iNOS, Insulin A-chain, Insulin B-chain, Insulin-like growth factor 1, integrin alpha2, integrin alpha3, integrin alpha4, integrin alpha4/beta1, integrin alpha4/beta7, integrin alpha5 (alphaV), integrin alpha5/beta1, integrin alpha5/beta3, integrin alpha6, integrin beta1, integrin beta2, interferon gamma, IP-10, I-TAC, JE, Kallikrein 2, Kallikrein 5, Kallikrein 6, Kallikrein 11, Kallikrein 12, Kallikrein 14, Kallikrein 15, Kallikrein L1, Kallikrein L2, Kallikrein L3, Kallikrein L4, KC, KDR, Keratinocyte Growth Factor (KGF), laminin 5, LAMP, LAP, LAP (TGF-1), Latent TGF-1, Latent TGF-1 bp1, LBP, LDGF, LECT2, Lefty, Lewis-Y antigen, Lewis-Y related antigen, LFA-1, LFA-3, Lfo, LIF, LIGHT, lipoproteins, LIX, LKN, Lptn, L-Selectin, LT-a, LT-b, LTB4, LTBP-1, Lung surfactant, Luteinizing hormone, Lymphotoxin Beta Receptor, Mac-1, MAdCAM, MAG, MAP2, MARC, MCAM, MCAM, MCK-2, MCP, M-CSF, MDC, Mer, METALLOPROTEASES, MGDF receptor, MGMT, MHC (HLA-DR), MIF, MIG, MIP, MIP-1-alpha, MK, MMAC1, MMP, MMP-1, MMP-10, MMP-11, MMP-12, MMP-13, MMP-14, MMP-15, MMP-2, MMP-24, MMP-3, MMP-7, MMP-8, MMP-9, MPIF, Mpo, MSK, MSP, mucin (Muc1), MUC18, Muellerian-inhibitin substance, Mug, MuSK, NAIP, NAP, NCAD, N-Cadherin, NCA 90, NCAM, NCAM, Neprilysin, Neurotrophin-3,-4, or -6, Neurturin, Neuronal growth factor (NGF), NGFR, NGF-beta, nNOS, NO, NOS, Npn, NRG-3, NT, NTN, OB, OGG1, OPG, OPN, OSM, OX40L, OX40R, p150, p95, PADPr, Parathyroid hormone, PARC, PARP, PBR, PBSF, PCAD, P-Cadherin, PCNA, PDGF, PDGF, PDK-1, PECAM, PEM, PF4, PGE, PGF, PGI2, PGJ2, PIN, PLA2, placental alkaline phosphatase (PLAP), P1GF, PLP, PP14, Proinsulin, Prorelaxin, Protein C, PS, PSA, PSCA, prostate specific membrane antigen (PSMA), PTEN, PTHrp, Ptk, PTN, R51, RANK, RANKL, RANTES, RANTES, Relaxin A-chain, Relaxin B-chain, renin, respiratory syncytial virus (RSV) F, RSV Fgp, Ret, Rheumatoid factors, RLIP76, RPA2, RSK, 5100, SCF/KL, SDF-1, SERINE, Serum albumin, sFRP-3, Shh, SIGIRR, SK-1, SLAM, SLPI, SMAC, SMDF, SMOH, SOD, SPARC, Stat, STEAP, STEAP-II, TACE, TACI, TAG-72 (tumor-associated glycoprotein-72), TARC, TCA-3, T-cell receptors (e.g., T-cell receptor alpha/beta), TdT, TECK, TEM1, TEM5, TEM7, TEM8, TERT, testicular PLAP-like alkaline phosphatase, TfR, TGF, TGF-alpha, TGF-beta, TGF-beta Pan Specific, TGF-beta RI (ALK-5), TGF-beta RII, TGF-beta RIIb, TGF-beta RIII, TGF-beta1, TGF-beta2, TGF-beta3, TGF-beta4, TGF-beta5, Thrombin, Thymus Ck-1, Thyroid stimulating hormone, Tie, TIMP, TIQ, Tissue Factor, TMEFF2, Tmpo, TMPRSS2, TNF, TNF-alpha, TNF-alpha beta, TNF-beta2, TNFc, TNF-RI, TNF-RII, TNFRSF10A (TRAIL R1Apo-2, DR4), TNFRSF10B (TRAIL R2DR5, KILLER, TRICK-2A, TRICK-B), TNFRSF10C (TRAIL R3DcR1, LIT, TRID), TNFRSF10D (TRAIL R4 DcR2, TRUNDD), TNFRSF11A (RANK ODF R, TRANCE R), TNFRSF11B (OPG OCIF, TR1), TNFRSF12 (TWEAK R FN14), TNFRSF13B (TACI), TNFRSF13C (BAFF R), TNFRSF14 (HVEM ATAR, HveA, LIGHT R, TR2), TNFRSF16 (NGFR p75NTR), TNFRSF17 (BCMA), TNFRSF18 (GITR AITR), TNFRSF19 (TROY TAJ, TRADE), TNFRSF19L (RELT), TNFRSF1A (TNF RI CD120a, p55-60), TNFRSF1B (TNF RII CD120b, p75-80), TNFRSF26 (TNFRH3), TNFRSF3 (LTbR TNF RIII, TNFC R), TNFRSF4 (OX40 ACT35, TXGP1 R), TNFRSF5 (CD40 p50), TNFRSF6 (Fas Apo-1, APT1, CD95), TNFRSF6B (DcR3M68, TR6), TNFRSF7 (CD27), TNFRSF8 (CD30), TNFRSF9 (4-1BB CD137, ILA), TNFRSF21 (DR6), TNFRSF22 (DcTRAIL R2TNFRH2), TNFRST23 (DcTRAIL R1TNFRH1), TNFRSF25 (DR3Apo-3, LARD, TR-3, TRAMP, WSL-1), TNFSF10 (TRAIL Apo-2 Ligand, TL2), TNFSF11 (TRANCE/RANK Ligand ODF, OPG Ligand), TNFSF12 (TWEAK Apo-3 Ligand, DR3Ligand), TNFSF13 (APRIL TALL2), TNFSF13B (BAFF BLYS, TALL1, THANK, TNFSF20), TNFSF14 (LIGHT HVEM Ligand, LTg), TNFSF15 (TL1A/VEGI), TNFSF18 (GITR Ligand AITR Ligand, TL6), TNFSF1A (TNF-a Conectin, DIF, TNFSF2), TNFSF1B (TNF-b LTa, TNFSF1), TNFSF3 (LTb TNFC, p33), TNFSF4 (OX40 Ligand gp34, TXGP1), TNFSF5 (CD40 Ligand CD154, gp39, HIGM1, IMD3, TRAP), TNFSF6 (Fas Ligand Apo-1 Ligand, APT1 Ligand), TNFSF7 (CD27 Ligand CD70), TNFSF8 (CD30 Ligand CD153), TNFSF9 (4-1BB Ligand CD137 Ligand), TP-1, t-PA, Tpo, TRAIL, TRAIL R, TRAIL-R1, TRAIL-R2, TRANCE, transferring receptor, TRF, Trk, TROP-2, TSG, TSLP, tumor-associated antigen CA 125, tumor-associated antigen expressing Lewis Y related carbohydrate, TWEAK, TXB2, Ung, uPAR, uPAR-1, Urokinase, VCAM, VCAM-1, VECAD, VE-Cadherin, VE-cadherin-2, VEFGR-1 (flt-1), VEGF, VEGFR, VEGFR-3 (flt-4), VEGI, VIM, Viral antigens, VLA, VLA-1, VLA-4, VNR integrin, von Willebrands factor, WIF-1, WNT1, WNT2, WNT2B/13, WNT3, WNT3A, WNT4, WNT5A, WNT5B, WNT6, WNT7A, WNT7B, WNT8A, WNT8B, WNT9A, WNT9A, WNT9B, WNT10A, WNT10B, WNT11, WNT16, XCL1, XCL2, XCR1, XCR1, XEDAR, XIAP, XPD, and receptors for hormones and growth factors.

[0380] Antibodies for Engineering

[0381] In some embodiments, the pI engineering described herein is done to therapeutic antibodies. A number of antibodies that are approved for use, in clinical trials, or in development may benefit from the pI variants of the present invention. These antibodies are herein referred to as “clinical products and candidates”. Thus in a preferred embodiment, the pI engineered constant region(s) of the present invention may find use in a range of clinical products and candidates. For example, a number of antibodies that target CD20 may benefit from the pI engineering of the present invention. For example the pI variants of the present invention may find use in an antibody that is substantially similar to rituximab (Rituxan®, IDEC/Genentech/Roche) (see for example U.S. Pat. No. 5,736,137), a chimeric anti-CD20 antibody approved to treat Non-Hodgkin's lymphoma; HuMax-CD20, an anti-CD20 currently being developed by Genmab, an anti-CD20 antibody described in U.S. Pat. No. 5,500,362, AME-133 (Applied Molecular Evolution), hA20 (Immunomedics, Inc.), HumaLYM (Intracel), and PRO70769 (PCT/US2003/040426, entitled “Immunoglobulin Variants and Uses Thereof”). A number of antibodies that target members of the family of epidermal growth factor receptors, including EGFR (ErbB-1), Her2/neu (ErbB-2), Her3 (ErbB-3), Her4 (ErbB-4), may benefit from pI engineered constant region(s) of the invention. For example the pI engineered constant region(s) of the invention may find use in an antibody that is substantially similar to trastuzumab (Herceptin®, Genentech) (see for example U.S. Pat. No. 5,677,171), a humanized anti-Her2/neu antibody approved to treat breast cancer; pertuzumab (rhuMab-2C4, Omnitarg™), currently being developed by Genentech; an anti-Her2 antibody described in U.S. Pat. No. 4,753,894; cetuximab (Erbitux®, Imclone) (U.S. Pat. No. 4,943,533; PCT WO 96/40210), a chimeric anti-EGFR antibody in clinical trials for a variety of cancers; ABX-EGF (U.S. Pat. No. 6,235,883), currently being developed by Abgenix-Immunex-Amgen; HuMax-EGFr (U.S. Ser. No. 10/172,317), currently being developed by Genmab; 425, EMD55900, EMD62000, and EMD72000 (Merck KGaA) (U.S. Pat. No. 5,558,864; Murthy et al. 1987, Arch Biochem Biophys. 252(2):549-60; Rodeck et al., 1987, J Cell Biochem. 35(4):315-20; Kettleborough et al., 1991, Protein Eng. 4(7):773-83); ICR62 (Institute of Cancer Research) (PCT WO 95/20045; Modjtahedi et al., 1993, J. Cell Biophys. 1993, 22(1-3):129-46; Modjtahedi et al., 1993, Br J. Cancer. 1993, 67(2):247-53; Modjtahedi et al, 1996, Br J Cancer, 73(2):228-35; Modjtahedi et al, 2003, Int J Cancer, 105(2):273-80); TheraCIM hR3 (YM Biosciences, Canada and Centro de Immunologia Molecular, Cuba (U.S. Pat. No. 5,891,996; U.S. Pat. No. 6,506,883; Mateo et al, 1997, Immunotechnology, 3(1):71-81); mAb-806 (Ludwig Institue for Cancer Research, Memorial Sloan-Kettering) (Jungbluth et al. 2003, Proc Natl Acad Sci USA. 100(2):639-44); KSB-102 (KS Biomedix); MR1-1 (IVAX, National Cancer Institute) (PCT WO 0162931A2); and SC100 (Scancell) (PCT WO 01/88138). In another preferred embodiment, the pI engineered constant region(s) of the present invention may find use in alemtuzumab (Campath®, Millenium), a humanized monoclonal antibody currently approved for treatment of B-cell chronic lymphocytic leukemia. The pI engineered constant region(s) of the present invention may find use in a variety of antibodies that are substantially similar to other clinical products and candidates, including but not limited to muromonab-CD3 (Orthoclone OKT3®), an anti-CD3 antibody developed by Ortho Biotech/Johnson & Johnson, ibritumomab tiuxetan (Zevalin®), an anti-CD20 antibody developed by IDEC/Schering AG, gemtuzumab ozogamicin (Mylotarg®), an anti-CD33 (p67 protein) antibody developed by Celltech/Wyeth, alefacept (Amevive®), an anti-LFA-3 Fc fusion developed by Biogen), abciximab (ReoPro®), developed by Centocor/Lilly, basiliximab (Simulect®), developed by Novartis, palivizumab (Synagis®), developed by MedImmune, infliximab (Remicade®), an anti-TNFalpha antibody developed by Centocor, adalimumab (Humira®), an anti-TNFalpha antibody developed by Abbott, Humicade™, an anti-TNFalpha antibody developed by Celltech, etanercept (Enbrel®), an anti-TNFalpha Fc fusion developed by Immunex/Amgen, ABX-CBL, an anti-CD147 antibody being developed by Abgenix, ABX-IL8, an anti-IL8 antibody being developed by Abgenix, ABX-MA1, an anti-MUC18 antibody being developed by Abgenix, Pemtumomab (R1549,90Y-muHMFG1), an anti-MUC1 In development by Antisoma, Therex (R1550), an anti-MUC1 antibody being developed by Antisoma, AngioMab (AS1405), being developed by Antisoma, HuBC-1, being developed by Antisoma, Thioplatin (AS 1407) being developed by Antisoma, Antegren® (natalizumab), an anti-alpha-4-beta-1 (VLA-4) and alpha-4-beta-7 antibody being developed by Biogen, VLA-1 mAb, an anti-VLA-1 integrin antibody being developed by Biogen, LTBR mAb, an anti-lymphotoxin beta receptor (LTBR) antibody being developed by Biogen, CAT-152, an anti-TGF-β2 antibody being developed by Cambridge Antibody Technology, J695, an anti-IL-12 antibody being developed by Cambridge Antibody Technology and Abbott, CAT-192, an anti-TGFβ1 antibody being developed by Cambridge Antibody Technology and Genzyme, CAT-213, an anti-Eotaxin1 antibody being developed by Cambridge Antibody Technology, LymphoStat-B™ an anti-Blys antibody being developed by Cambridge Antibody Technology and Human Genome Sciences Inc., TRAIL-R1 mAb, an anti-TRAIL-R1 antibody being developed by Cambridge Antibody Technology and Human Genome Sciences, Inc., Avastin™ (bevacizumab, rhuMAb-VEGF), an anti-VEGF antibody being developed by Genentech, an anti-HER receptor family antibody being developed by Genentech, Anti-Tissue Factor (ATF), an anti-Tissue Factor antibody being developed by Genentech, Xolair™ (Omalizumab), an anti-IgE antibody being developed by Genentech, Raptiva™ (Efalizumab), an anti-CD11a antibody being developed by Genentech and Xoma, MLN-02 Antibody (formerly LDP-02), being developed by Genentech and Millenium Pharmaceuticals, HuMax CD4, an anti-CD4 antibody being developed by Genmab, HuMax-IL15, an anti-IL15 antibody being developed by Genmab and Amgen, HuMax-Inflam, being developed by Genmab and Medarex, HuMax-Cancer, an anti-Heparanase I antibody being developed by Genmab and Medarex and Oxford GcoSciences, HuMax-Lymphoma, being developed by Genmab and Amgen, HuMax-TAC, being developed by Genmab, IDEC-131, and anti-CD40L antibody being developed by IDEC Pharmaceuticals, IDEC-151 (Clenoliximab), an anti-CD4 antibody being developed by IDEC Pharmaceuticals, IDEC-114, an anti-CD80 antibody being developed by IDEC Pharmaceuticals, IDEC-152, an anti-CD23 being developed by IDEC Pharmaceuticals, anti-macrophage migration factor (MIF) antibodies being developed by IDEC Pharmaceuticals, BEC2, an anti-idiotypic antibody being developed by Imclone, IMC-1C11, an anti-KDR antibody being developed by Imclone, DC101, an anti-flk-1 antibody being developed by Imclone, anti-VE cadherin antibodies being developed by Imclone, CEA-Cide™ (labetuzumab), an anti-carcinoembryonic antigen (CEA) antibody being developed by Immunomedics, LymphoCide™ (Epratuzumab), an anti-CD22 antibody being developed by Immunomedics, AFP-Cide, being developed by Immunomedics, MyelomaCide, being developed by Immunomedics, LkoCide, being developed by Immunomedics, ProstaCide, being developed by Immunomedics, MDX-010, an anti-CTLA4 antibody being developed by Medarex, MDX-060, an anti-CD30 antibody being developed by Medarex, MDX-070 being developed by Medarex, MDX-018 being developed by Medarex, Osidem™ (IDM-1), and anti-Her2 antibody being developed by Medarex and Immuno-Designed Molecules, HuMax™-CD4, an anti-CD4 antibody being developed by Medarex and Genmab, HuMax-IL15, an anti-IL15 antibody being developed by Medarex and Genmab, CNTO 148, an anti-TNFα antibody being developed by Medarex and Centocor/J&J, CNTO 1275, an anti-cytokine antibody being developed by Centocor/J&J, MOR101 and MOR102, anti-intercellular adhesion molecule-1 (ICAM-1) (CD54) antibodies being developed by MorphoSys, MOR201, an anti-fibroblast growth factor receptor 3 (FGFR-3) antibody being developed by MorphoSys, Nuvion® (visilizumab), an anti-CD3 antibody being developed by Protein Design Labs, HuZAF™, an anti-gamma interferon antibody being developed by Protein Design Labs, Anti-α5β1 Integrin, being developed by Protein Design Labs, anti-IL-12, being developed by Protein Design Labs, ING-1, an anti-Ep-CAM antibody being developed by Xoma, and MLN01, an anti-Beta2 integrin antibody being developed by Xoma, an pI-ADC antibody being developed by Seattle Genetics, all of the above-cited references in this paragraph are expressly incorporated herein by reference.

### IX. Antibody Compositions for In Vivo Administration

[0382] The use of the pI antibodies of the invention in therapy will depend on the antigen binding component; e.g. in the case of full length standard therapeutic antibodies, on the antigen to which the antibody's Fv binds. That is, as will be appreciated by those in the art, the treatment of specific diseases can be done with the additional benefit of mulitspecificity and/or increased half life of the molecule. This can result in a variety of benefits, including, but not limited to, novel therapeutic treatments and mechanisms, less frequent dosing (which can lead to better patient compliance), lower dosing, and lower production costs.

[0383] In another embodiment, the reduced pI variants of the invention can be utilized for intraocular/intravitreal administration of antibody against a variety of targets, including but not limited to VEGF, Ang-2, and the compliment C3 and C5 protein (or their cleavage products C3a and C5a). Due to the near-neutral pH of the eye, coupled with the high initial concentrations of injected therapeutic antibodies, there is a general risk of low solubility when the pI of the antibody approaches that of the pH in the ocular environment. In this embodiment, heterodimers may or may not be preferred; that is, homodimers of either lowered or raised pI heavy chains can be used, thus promoting high solubility upon administration.

[0384] Formulations of the antibodies used in accordance with the present invention are prepared for storage by mixing an antibody having the desired degree of purity with optional pharmaceutically acceptable carriers, excipients or stabilizers (Remington's Pharmaceutical Sciences 16th edition, Osol, A. Ed. [1980]), in the form of lyophilized formulations or aqueous solutions. Acceptable carriers, excipients, or stabilizers are nontoxic to recipients at the dosages and concentrations employed, and include buffers such as phosphate, citrate, and other organic acids; antioxidants including ascorbic acid and methionine; preservatives (such as octadecyldimethylbenzyl ammonium chloride; hexamethonium chloride; benzalkonium chloride, benzethonium chloride; phenol, butyl or benzyl alcohol; alkyl parabens such as methyl or propyl paraben; catechol; resorcinol; cyclohexanol; 3-pentanol; and m-cresol); low molecular weight (less than about 10 residues) polypeptides; proteins, such as serum albumin, gelatin, or immunoglobulins; hydrophilic polymers such as polyvinylpyrrolidone; amino acids such as glycine, glutamine, asparagine, histidine, arginine, or lysine; monosaccharides, disaccharides, and other carbohydrates including glucose, mannose, or dextrins; chelating agents such as EDTA; sugars such as sucrose, mannitol, trehalose or sorbitol; salt-forming counter-ions such as sodium; metal complexes (e.g. Zn-protein complexes); and/or non-ionic surfactants such as TWEEN™, PLURONICS™ or polyethylene glycol (PEG).

[0385] The formulation herein may also contain more than one active compound as necessary for the particular indication being treated, preferably those with complementary activities that do not adversely affect each other. For example, it may be desirable to provide antibodies with other specifcities. Alternatively, or in addition, the composition may comprise a cytotoxic agent, cytokine, growth inhibitory agent and/or small molecule antagonist. Such molecules are suitably present in combination in amounts that are effective for the purpose intended.

[0386] The active ingredients may also be entrapped in microcapsules prepared, for example, by coacervation techniques or by interfacial polymerization, for example, hydroxymethylcellulose or gelatin-microcapsules and poly-(methylmethacylate) microcapsules, respectively, in colloidal drug delivery systems (for example, liposomes, albumin microspheres, microemulsions, nano-particles and nanocapsules) or in macroemulsions. Such techniques are disclosed in Remington's Pharmaceutical Sciences 16th edition, Osol, A. Ed. (1980).

[0387] The formulations to be used for in vivo administration should be sterile, or nearly so. This is readily accomplished by filtration through sterile filtration membranes.

[0388] Sustained-release preparations may be prepared. Suitable examples of sustained-release preparations include semipermeable matrices of solid hydrophobic polymers containing the antibody, which matrices are in the form of shaped articles, e.g. films, or microcapsules. Examples of sustained-release matrices include polyesters, hydrogels (for example, poly(2-hydroxyethyl-methacrylate), or poly(vinylalcohol)), polylactides (U.S. Pat. No. 3,773,919), copolymers of L-glutamic acid and γ ethyl-L-glutamate, non-degradable ethylene-vinyl acetate, degradable lactic acid-glycolic acid copolymers such as the LUPRON DEPOT™ (injectable microspheres composed of lactic acid-glycolic acid copolymer and leuprolide acetate), and poly-D-(−)-3-hydroxybutyric acid. While polymers such as ethylene-vinyl acetate and lactic acid-glycolic acid enable release of molecules for over 100 days, certain hydrogels release proteins for shorter time periods.

[0389] When encapsulated antibodies remain in the body for a long time, they may denature or aggregate as a result of exposure to moisture at 37° C., resulting in a loss of biological activity and possible changes in immunogenicity. Rational strategies can be devised for stabilization depending on the mechanism involved. For example, if the aggregation mechanism is discovered to be intermolecular S—S bond formation through thio-disulfide interchange, stabilization may be achieved by modifying sulfhydryl residues, lyophilizing from acidic solutions, controlling moisture content, using appropriate additives, and developing specific polymer matrix compositions.

### X. Administrative Modalities

[0390] The antibodies and chemotherapeutic agents of the invention are administered to a subject, in accord with known methods, such as intravenous administration as a bolus or by continuous infusion over a period of time, by intramuscular, intraperitoneal, intracerobrospinal, subcutaneous, intra-articular, intrasynovial, intrathecal, oral, topical, or inhalation routes. Intravenous or subcutaneous administration of the antibody is preferred.

### XI. Treatment Modalities

[0391] In the methods of the invention, therapy is used to provide a positive therapeutic response with respect to a disease or condition. By “positive therapeutic response” is intended an improvement in the disease or condition, and/or an improvement in the symptoms associated with the disease or condition. For example, a positive therapeutic response would refer to one or more of the following improvements in the disease: (1) a reduction in the number of neoplastic cells; (2) an increase in neoplastic cell death; (3) inhibition of neoplastic cell survival; (5) inhibition (i.e., slowing to some extent, preferably halting) of tumor growth; (6) an increased patient survival rate; and (7) some relief from one or more symptoms associated with the disease or condition.

[0392] Positive therapeutic responses in any given disease or condition can be determined by standardized response criteria specific to that disease or condition. Tumor response can be assessed for changes in tumor morphology (i.e., overall tumor burden, tumor size, and the like) using screening techniques such as magnetic resonance imaging (MRI) scan, x-radiographic imaging, computed tomographic (CT) scan, bone scan imaging, endoscopy, and tumor biopsy sampling including bone marrow aspiration (BMA) and counting of tumor cells in the circulation.

[0393] In addition to these positive therapeutic responses, the subject undergoing therapy may experience the beneficial effect of an improvement in the symptoms associated with the disease.

[0394] Thus for B cell tumors, the subject may experience a decrease in the so-called B symptoms, i.e., night sweats, fever, weight loss, and/or urticaria. For pre-malignant conditions, therapy with an pI therapeutic agent may block and/or prolong the time before development of a related malignant condition, for example, development of multiple myeloma in subjects suffering from monoclonal gammopathy of undetermined significance (MGUS).

[0395] An improvement in the disease may be characterized as a complete response. By “complete response” is intended an absence of clinically detectable disease with normalization of any previously abnormal radiographic studies, bone marrow, and cerebrospinal fluid (CSF) or abnormal monoclonal protein in the case of myeloma.

[0396] Such a response may persist for at least 4 to 8 weeks, or sometimes 6 to 8 weeks, following treatment according to the methods of the invention. Alternatively, an improvement in the disease may be categorized as being a partial response. By “partial response” is intended at least about a 50% decrease in all measurable tumor burden (i.e., the number of malignant cells present in the subject, or the measured bulk of tumor masses or the quantity of abnormal monoclonal protein) in the absence of new lesions, which may persist for 4 to 8 weeks, or 6 to 8 weeks.

[0397] Treatment according to the present invention includes a “therapeutically effective amount” of the medicaments used. A “therapeutically effective amount” refers to an amount effective, at dosages and for periods of time necessary, to achieve a desired therapeutic result.

[0398] A therapeutically effective amount may vary according to factors such as the disease state, age, sex, and weight of the individual, and the ability of the medicaments to elicit a desired response in the individual. A therapeutically effective amount is also one in which any toxic or detrimental effects of the antibody or antibody portion are outweighed by the therapeutically beneficial effects.

[0399] A “therapeutically effective amount” for tumor therapy may also be measured by its ability to stabilize the progression of disease. The ability of a compound to inhibit cancer may be evaluated in an animal model system predictive of efficacy in human tumors.

[0400] Alternatively, this property of a composition may be evaluated by examining the ability of the compound to inhibit cell growth or to induce apoptosis by in vitro assays known to the skilled practitioner. A therapeutically effective amount of a therapeutic compound may decrease tumor size, or otherwise ameliorate symptoms in a subject. One of ordinary skill in the art would be able to determine such amounts based on such factors as the subject's size, the severity of the subject's symptoms, and the particular composition or route of administration selected.

[0401] Dosage regimens are adjusted to provide the optimum desired response (e.g., a therapeutic response). For example, a single bolus may be administered, several divided doses may be administered over time or the dose may be proportionally reduced or increased as indicated by the exigencies of the therapeutic situation. Parenteral compositions may be formulated in dosage unit form for ease of administration and uniformity of dosage. Dosage unit form as used herein refers to physically discrete units suited as unitary dosages for the subjects to be treated; each unit contains a predetermined quantity of active compound calculated to produce the desired therapeutic effect in association with the required pharmaceutical carrier.

[0402] The specification for the dosage unit forms of the present invention are dictated by and directly dependent on (a) the unique characteristics of the active compound and the particular therapeutic effect to be achieved, and (b) the limitations inherent in the art of compounding such an active compound for the treatment of sensitivity in individuals.

[0403] The efficient dosages and the dosage regimens for the pI antibodies used in the present invention depend on the disease or condition to be treated and may be determined by the persons skilled in the art.

[0404] An exemplary, non-limiting range for a therapeutically effective amount of an pI antibody used in the present invention is about 0.1-100 mg/kg, such as about 0.1-50 mg/kg, for example about 0.1-20 mg/kg, such as about 0.1-10 mg/kg, for instance about 0.5, about such as 0.3, about 1, or about 3 mg/kg. In another embodiment, he antibody is administered in a dose of 1 mg/kg or more, such as a dose of from 1 to 20 mg/kg, e.g. a dose of from 5 to 20 mg/kg, e.g. a dose of 8 mg/kg.

[0405] A medical professional having ordinary skill in the art may readily determine and prescribe the effective amount of the pharmaceutical composition required. For example, a physician or a veterinarian could start doses of the medicament employed in the pharmaceutical composition at levels lower than that required in order to achieve the desired therapeutic effect and gradually increase the dosage until the desired effect is achieved.

[0406] In one embodiment, the pI antibody is administered by infusion in a weekly dosage of from 10 to 500 mg/kg such as of from 200 to 400 mg/kg Such administration may be repeated, e.g., 1 to 8 times, such as 3 to 5 times. The administration may be performed by continuous infusion over a period of from 2 to 24 hours, such as of from 2 to 12 hours.

[0407] In one embodiment, the pI antibody is administered by slow continuous infusion over a long period, such as more than 24 hours, if required to reduce side effects including toxicity.

[0408] In one embodiment the pI antibody is administered in a weekly dosage of from 250 mg to 2000 mg, such as for example 300 mg, 500 mg, 700 mg, 1000 mg, 1500 mg or 2000 mg, for up to 8 times, such as from 4 to 6 times. The administration may be performed by continuous infusion over a period of from 2 to 24 hours, such as of from 2 to 12 hours. Such regimen may be repeated one or more times as necessary, for example, after 6 months or 12 months. The dosage may be determined or adjusted by measuring the amount of compound of the present invention in the blood upon administration by for instance taking out a biological sample and using anti-idiotypic antibodies which target the antigen binding region of the pI antibody.

[0409] In a further embodiment, the pI antibody is administered once weekly for 2 to 12 weeks, such as for 3 to 10 weeks, such as for 4 to 8 weeks.

[0410] In one embodiment, the pI antibody is administered by maintenance therapy, such as, e.g., once a week for a period of 6 months or more.

[0411] In one embodiment, the pI antibody is administered by a regimen including one infusion of an pI antibody followed by an infusion of an pI antibody conjugated to a radioisotope. The regimen may be repeated, e.g., 7 to 9 days later.

[0412] As non-limiting examples, treatment according to the present invention may be provided as a daily dosage of an antibody in an amount of about 0.1-100 mg/kg, such as 0.5, 0.9, 1.0, 1.1, 1.5, 2, 3, 4, 5, 6, 7, 8, 9, 10, 11, 12, 13, 14, 15, 16, 17, 18, 19, 20, 21, 22, 23, 24, 25, 26, 27, 28, 29, 30, 40, 45, 50, 60, 70, 80, 90 or 100 mg/kg, per day, on at least one of day 1, 2, 3, 4, 5, 6, 7, 8, 9, 10, 11, 12, 13, 14, 15, 16, 17, 18, 19, 20, 21, 22, 23, 24, 25, 26, 27, 28, 29, 30, 31, 32, 33, 34, 35, 36, 37, 38, 39, or 40, or alternatively, at least one of week 1, 2, 3, 4, 5, 6, 7, 8, 9, 10, 11, 12, 13, 14, 15, 16, 17, 18, 19 or 20 after initiation of treatment, or any combination thereof, using single or divided doses of every 24, 12, 8, 6, 4, or 2 hours, or any combination thereof.

[0413] In some embodiments the pI antibody molecule thereof is used in combination with one or more additional therapeutic agents, e.g. a chemotherapeutic agent. Non-limiting examples of DNA damaging chemotherapeutic agents include topoisomerase I inhibitors (e.g., irinotecan, topotecan, camptothecin and analogs or metabolites thereof, and doxorubicin); topoisomerase II inhibitors (e.g., etoposide, teniposide, and daunorubicin); alkylating agents (e.g., melphalan, chlorambucil, busulfan, thiotepa, ifosfamide, carmustine, lomustine, semustine, streptozocin, decarbazine, methotrexate, mitomycin C, and cyclophosphamide); DNA intercalators (e.g., cisplatin, oxaliplatin, and carboplatin); DNA intercalators and free radical generators such as bleomycin; and nucleoside mimetics (e.g., 5-fluorouracil, capecitibine, gemcitabine, fludarabine, cytarabine, mercaptopurine, thioguanine, pentostatin, and hydroxyurea).

[0414] Chemotherapeutic agents that disrupt cell replication include: paclitaxel, docetaxel, and related analogs; vincristine, vinblastin, and related analogs; thalidomide, lenalidomide, and related analogs (e.g., CC-5013 and CC-4047); protein tyrosine kinase inhibitors (e.g., imatinib mesylate and gefitinib); proteasome inhibitors (e.g., bortezomib); NF-κB inhibitors, including inhibitors of IκB kinase; antibodies which bind to proteins overexpressed in cancers and thereby downregulate cell replication (e.g., trastuzumab, rituximab, cetuximab, and bevacizumab); and other inhibitors of proteins or enzymes known to be upregulated, over-expressed or activated in cancers, the inhibition of which downregulates cell replication.

[0415] In some embodiments, the antibodies of the invention can be used prior to, concurrent with, or after treatment with Velcade® (bortezomib).

### EXAMPLES

[0416] Examples are provided below to illustrate the present invention. These examples are not meant to constrain the present invention to any particular application or theory of operation. For all constant region positions discussed in the present invention, numbering is according to the EU index as in Kabat (Kabat et al., 1991, Sequences of Proteins of Immunological Interest, 5th Ed., United States Public Health Service, National Institutes of Health, Bethesda, entirely incorporated by reference). Those skilled in the art of antibodies will appreciate that this convention consists of nonsequential numbering in specific regions of an immunoglobulin sequence, enabling a normalized reference to conserved positions in immunoglobulin families. Accordingly, the positions of any given immunoglobulin as defined by the EU index will not necessarily correspond to its sequential sequence.

### Example 1

### Design of Non-Native Charge Substitutions to Reduce pI

[0417] Antibody constant chains were modified with lower pI by engineering substitutions in the constant domains. Reduced pI can be engineered by making substitutions of basic amino acids (K or R) to acidic amino acids (D or E), which result in the largest decrease in pI. Mutations of basic amino acids to neutral amino acids and neutral amino acids to acidic amino acids will also result in a decrease in pI. A list of amino acid pK values can be found in Table 1 of Bjellqvist et al., 1994, Electrophoresis 15:529-539.

[0418] We chose to explore substitutions in the antibody CH1 (Cγ1) and CL (Ckappa or CK) regions (sequences are shown in FIG. 1) because, unlike the Fc region, they do not interact with native ligands that impact the antibody's pharmacological properties. In deciding which positions to mutate, the surrounding environment and number of contacts the WT amino acid makes with its neighbors was taken into account such as to minimize the impact of a substitution or set of substitutions on structure and/or function. The solvent accessibility or fraction exposed of each CH1 and CK position was calculated using relevant crystal structures of antibody Fab domains. The results are shown in FIGS. 2 and 3 for the Cγ1 and CK respectively. Design was guided further by examining the CH1 and CL domains for positions that are isotypic between the immunoglobulin isotypes (IgG1, IgG2, IgG3, and IgG4). Because such variations occur naturally, such position are expected to be amenable to substitution. Based on this analysis, a number of substitutions were identified that reduce pI but are predicted to have minimal impact on the biophysical properties of the domains.

### Example 2

### Anti-VEGF Antibodies with Engineered CH1 and CK Regions Having Lower pI

[0419] Amino acid modifications were engineered in the CH1 and CK domains of an IgG1 antibody to lower the pI of the antibody. Based on the above analysis, chosen substitutions for the heavy chain CH1 were 119E, 133E, 164E, 205E, 208D, and 210E, and substitutions for the light chain CK substitutions were 126E, 145E, 152D, 156E, 169E, and 202E. These variant constant chains are referred to as IgG1-CH1-pI(6) and CK-pI(6) respectively, and their amino acid sequences are provided in FIG. 4.

[0420] CH1 and CK variants were engineered in the context of an antibody targeting vascular endothelial factor (VEGF). The heavy and light chain variable regions (VH and VL) are those of a humanized version of the antibody A4.6.1, also referred to as bevacizumab (Avastin®), which is approved for the treatment of a variety of cancers. These variable region sequences are provided in FIG. 5. The anti-VEGF antibody variant containing the low pI substitutions is referred to as XENP9493 Bevacizumab-IgG1-CH1-pI(6)-CK-pI(6), and the amino acid sequences of the heavy and light chains of this antibody are provided in FIG. 6. A structural model of the Fab domain showing the 6 substitutions of CH1-pI(6) and the 6 substitutions of CK-pI(6) is shown in FIG. 7. The calculated pI of WT anti-VEGF (bevacizumab) is 8.14. The calculated pI of the engineered anti-VEGF CH1 variant is 6.33 and that of the anti-VEGF CK variant is 6.22. When the heavy chain and light chain pI engineered anti-VEGF variants are co-transfected, the full-length anti-VEGF mAb has a calculated pI of 5.51.

[0421] Genes encoding the heavy and light chains of the anti-VEGF antibodies were constructed in the mammalian expression vector pTT5. The human IgG1 constant chain gene was obtained from IMAGE clones and subcloned into the pTT5 vector. VH and VL genes encoding the anti-VEGF antibodies were synthesized commercially (Blue Heron Biotechnologies, Bothell Wash.), and subcloned into the vectors encoding the appropriate CL and IgG 1 constant chains. Amino acid modifications were constructed using site-directed mutagenesis using the QuikChange® site-directed mutagenesis methods (Stratagene, La Jolla Calif.). All DNA was sequenced to confirm the fidelity of the sequences.

[0422] Plasmids containing heavy chain gene (VH-Cγ1-Cγ2-Cγ3) were co-transfected with plasmid containing light chain gene (VL-CK) into 293E cells using llipofectamine (Invitrogen, Carlsbad Calif.) and grown in FreeStyle 293 media (Invitrogen, Carlsbad Calif.). After 5 days of growth, the antibodies were purified from the culture supernatant by protein A affinity using the MabSelect resin (GE Healthcare). Antibody concentrations were determined by bicinchoninic acid (BCA) assay (Pierce).

[0423] The pI engineered anti-VEGF mAbs were characterized by SDS PAGE on an Agilent Bioanalyzer (FIG. 8), by size exclusion chromatography (SEC) (FIG. 9), isoelectric focusing (IEF) gel electrophoresis (FIG. 10), binding to antigen VEGF by Biacore (FIG. 11), and differential scanning calorimetry (DSC) (FIG. 12). All mAbs showed high purity on SDS-PAGE and SEC. IEF gels indicated that each variant had the designed isoelectric point. VEGF binding analysis on Biacore showed that pI engineered anti-VEGF bound to VEGF with similar affinity as bevacizumab, indicating that the designed substitutions did not perturb the function of the mAb. DSC showed that the anti-VEGF variant with both CH1 and CL engineered substitutions had high thermostability with a Tm of 71.9° C.

[0424] Pharmacokinetic experiments were performed in B6 mice that are homozygous knock-outs for murine FcRn and heterozygous knock-ins of human FcRn (mFcRn^{-/-}, hFcRn⁺) (Petkova et al., 2006, Int Immunol 18(12):1759-69, entirely incorporated by reference), herein referred to as hFcRn or hFcRn⁺ mice. Samples tested included the parent IgG1/2 constant region, the pI-engineered variant with a pI of 5.51, referred to as IgG1_CH-CL_pI_eng, and an Fc variant version of IgG1/2 containing the substitution N434S, which improves affinity to human FcRn.

[0425] A single, intravenous tail vein injection of anti-VEGF antibody (2 mg/kg) was given to groups of 4-7 female mice randomized by body weight (20-30 g range). Blood (˜50 ul) was drawn from the orbital plexus at each time point, processed to serum, and stored at −80° C. until analysis. Antibody concentrations were determined using an ELISA assay. Serum concentration of antibody was measured using a recombinant VEGF (VEGF-165, PeproTech, Rocky Hill, N.J.) as capture reagent, and detection was carried out with biotinylated anti-human kappa antibody and europium-labeled streptavidin. The time resolved fluorescence signal was collected. PK parameters were determined for individual mice with a non-compartmental model using WinNonLin (Pharsight Inc, Mountain View Calif.). Nominal times and dose were used with uniform weighing of points.

[0426] Results are shown in FIG. 13. Fitted half-life (t1/2) values, which represents the beta phase that characterizes elimination of antibody from serum, are shown in Table 1. The pI-engineered variant, containing substitutions in CH1 and CL that reduce the pI, extended half-life to 7.4 days, an improvement of approximately 2.6-fold relative to IgG1/2. The pI-engineered variant had a comparable half-life to the Fc variant version N434S. Combinations of antibody variants are contemplated that reduce pI and improve affinity for FcRn for extending the half-lives of antibodies and Fc fusions.

TABLE 1
PK results of pI-engineered variant

| | | | Individual mice | | | | Average | |
|---|---|---|---|---|---|---|---|---|
| | | | t½ (days) | | | | t½ | St. Dev. |
| Group | Variant | n | n1 | n2 | n3 | n4 | (days) | (days) |
| 7349 | IgG1/2_WT | 4 | 2.9 | 2.5 | 3.2 | 2.8 | 2.9 | 0.3 |
| 7350 | IgG1/2_N434S | 4 | 6.3 | 7.7 | 7.3 | 6.5 | 7.0 | 0.7 |
| 9493 | IgG1_CH-CL_pI_eng | 3 | 7.4 | 8.4 | 6.4 | | 7.4 | 1.0 |

### Example 3

### PK Analysis of IgG Constant Regions

[0427] PK studies of IgG1 and IgG2 isotype versions of bevacizumab were carried out in the huFcRn mice as described above. The IgG1 results from four separate PK studies are shown in FIG. 14. The half-lives from the four studies were 3.0, 3.9, 2.8, and 2.9 days, resulting in an average half-life of 3.2 days. The PK results from the IgG2 study are shown in FIG. 15. The half-life of IgG2 was 5.9 days.

[0428] The PK results from the IgG1 and IgG2 were analyzed with the results from the IgG1/2 and pI-engineered versions of bevacizumab. Table 2 shows the half-lives of the antibodies along with their calculated pI. These data are plotted in FIG. 16.

TABLE 2
PK results of antibodies with identical Fv (bevacizumab)
but constant regions with different pI's

| XENP | IgG | pI | Average t½ (days) |
|---|---|---|---|
| 4547 | IgG1 | 8.1 | 3.2 |
| 7349 | IgG1/2 | 8.1 | 2.9 |
| 6384 | IgG2 | 7.3 | 5.9 |
| 9493 | IgG1_CH-CL_pI_eng | 5.6 | 7.4 |
| | [aka IgG1-pI(12)] | | |

[0429] A correlation was observed between half-life and the pI of the antibodies. These data further suggest that engineering of antibody constant chains, including heavy and light chain constant regions, for reduced isoelectric point is potentially a novel generalizable approach to extending the serum half-lives of antibodies and Fc fusions.

### Example 4

### Engineering Approaches to Constant Region pI Engineering

[0430] Reduction in the pI of a protein or antibody can be carried out using a variety of approaches. At the most basic level, residues with high pKa's (lysine, arginine, and to some extent histidine) are replaced with neutral or negative residues, and/or neutral residues are replaced with low pKa residues (aspartic acid and glutamic acid). The particular replacements may depend on a variety of factors, including location in the structure, role in function, and immunogenicity.

[0431] Because immunogenicity is a concern, efforts can be made to minimize the risk that a substitution that lowers the pI will elicit immunogenicity. One way to minimize risk is to minimize the mutational load of the variants, i.e. to reduce the pI with the fewest number of mutations. Charge swapping mutations, where a K, R, or H is replaced with a D or E, have the greatest impact on reducing pI, and so these substitutions are preferred. Another approach to minimizing the risk of immunogenicity while reducing pI is to utilize substitutions from homologous human proteins. Thus for antibody constant chains, the isotypic differences between the IgG subclasses (IgG1, IgG2, IgG3, and IgG4) provide low-risk substitutions. Because immune recognition occurs at a local sequence level, i.e. MHC II and T-cell receptors recognize epitopes typically 9 residues in length, pI-altering substitutions may be accompanied by isotypic substitutions proximal in sequence. In this way, epitopes can be extended to match a natural isotype. Such substitutions would thus make up epitopes that are present in other human IgG isotypes, and thus would be expected to be tolerized.

[0432] FIG. 17 shows an amino acid sequence alignment of the IgG subclasses. Residues with a bounded box illustrate isotypic differences between the IgG's. Residues which contribute to a higher pI (K, R, and H) or lower pI (D and E) are highlighted in bold. Designed substitutions that either lower the pI, or extend an epitope to match a natural isotype are shown in gray.

[0433] FIG. 18 shows the amino acid sequence of the CK and Cλ light constant chains. Homology between Cκ and Cλ is not as high as between the IgG subclasses. Nonetheless the alignment may be used to guide substitutions. Residues which contribute to a higher pI (K, R, and H) or lower pI (D and E) are highlighted in bold. Gray indicates lysine, arginines, and histidines that may be substituted, preferably with aspartic or glutatmic acids, to lower the isoelectric point.

[0434] Another approach to engineering lower pI into proteins and antibodies is to fuse negatively charged residues to the N- or C-termini. Thus for example, peptides consisting principally of aspartic acids and glutamic acid may be fused to the N-terminus or C-terminus to the antibody heavy chain, light chain or both. Because the N-termini are structurally close to the antigen binding site, the C-termini are preferred.

[0435] Based on the described engineering approaches, a number of variants were designed to reduce the isoelectric point of both the antibody heavy chain and light chain. The heavy chain variants comprise various combinations of isotypic substitutions, as well as C-terminal negatively charged peptides. Relative to a native IgG1, the variants comprise one or more isotypic substitutions from the group consisting of G137E, G138S, S192N, L193F, I199T, N₂₀₃D, K214T, K222T, substitution of 221-225 DKTHT to VE, H268Q, K274Q, R355Q, N384S, K392N, V397M, Q419E, and a deletion of K447 (referred to as K447#), wherein numbering is according to the EU index. The light chain variants comprise various combinations of non-isotypic substitutions and C-terminal negatively charged peptides. CK variants comprise one or more substitutions from the group consisting of K126E, K145E, N152D, S156E, K169E, and S202E, wherein numbering is according to the EU index.

[0436] Sequences of the variant heavy chains are provided in FIG. 19, and sequences of the variant light chains are provided in FIG. 20. Table 3 lists the variants constructed, along with the calculated pI's of the heavy constant chain, light constant chain, as well as the pI of the full length monoclonal antibody (mAb) containing the variable region (Fv) of the anti-VEGF antibody Bevacizumab.

TABLE 3
pI-engineered antibody constant chain variants

| Heavy Chain | | Light Chain | | Fv | | | mAb^{b} |
|---|---|---|---|---|---|---|---|
| Identity | pI | Identity | pI | Identity^{a} | VH pI | VL pI | pI |
| IgG1-WT | 8.46 | Ck-WT | 6.1 | Bev | 6.99 | 6.75 | 8.10 |
| IgG1-WT | 8.46 | Ck-pI(3) | 4.6 | Bev | 6.99 | 6.75 | 6.58 |
| IgG1-WT | 8.46 | Ck-pI(6) | 4.4 | Bev | 6.99 | 6.75 | 6.21 |
| IgG1-WT | 8.46 | Ck-pI(6- | 4.3 | Bev | 6.99 | 6.75 | 5.85 |
| | | DEDE) | | | | | |
| IgG2-WT | 7.66 | Ck-WT | 6.1 | Bev | 6.99 | 6.75 | 7.31 |
| IgG2-WT | 7.66 | Ck-pI(3) | 4.6 | Bev | 6.99 | 6.75 | 6.16 |
| IgG2-WT | 7.66 | Ck-pI(6) | 4.4 | Bev | 6.99 | 6.75 | 5.88 |
| IgG2-WT | 7.66 | Ck-pI(6- | 4.3 | Bev | 6.99 | 6.75 | 5.58 |
| | | DEDE) | | | | | |
| pI-iso1 | 5.93 | Ck-WT | 6.1 | Bev | 6.99 | 6.75 | 6.16 |
| pI-iso1(NF) | 5.93 | Ck-WT | 6.1 | Bev | 6.99 | 6.75 | 6.16 |
| pI-iso1(NF-VE) | 5.85 | Ck-WT | 6.1 | Bev | 6.99 | 6.75 | 6.11 |
| pI-iso1(NF-VE) | 5.85 | Ck-pI(3) | 4.6 | Bev | 6.99 | 6.75 | 5.58 |
| pI-iso1(NF-VE) | 5.85 | Ck-pI(6) | 4.4 | Bev | 6.99 | 6.75 | 5.38 |
| pI-iso1(NF-VE) | 5.85 | Ck-pI(6- | 4.3 | Bev | 6.99 | 6.75 | 5.18 |
| | | DEDE) | | | | | |
| pI-iso1(NF-VE- | 5.36 | Ck-WT | 6.1 | Bev | 6.99 | 6.75 | 5.74 |
| DEDE) | | | | | | | |
| pI-iso1(NF-VE- | 5.36 | Ck-pI(3) | 4.6 | Bev | 6.99 | 6.75 | 5.32 |
| DEDE) | | | | | | | |
| pI-iso1(NF-VE- | 5.36 | Ck-pI(6) | 4.4 | Bev | 6.99 | 6.75 | 5.18 |
| DEDE) | | | | | | | |
| pI-iso1(NF-VE- | 5.36 | Ck-pI(6- | 4.3 | Bev | 6.99 | 6.75 | 5.03 |
| DEDE) | | DEDE) | | | | | |

^{a}Bev = the variable region of the anti-VEGF antibody Bevacizumab
^{b}mAb pI = the pI of the full length monoclonal antibody containing the Fv of Bevacizumab

### Example 5

### Determination of Charge-Dependency of pI Engineering and Potential Combination with Fc Variants that Enhance Binding to FcRn

[0437] A series of new pI-engineered variants were generated to test two aspects of the relationship between low pI and extended half-life. First, the parameter of charge was investigated by making a controlled set of variants based on the 9493 IgG1-pI(12) variant. These variants, 10017, 10018, and 10019, are described in Table 4, along with their pI and the differences in positively and negatively charged residues relative to bevacizumab IgG1 WT.

TABLE 4
Engineered constructs exploring charge and Fc variants

| | | | | | Charge | | |
|---|---|---|---|---|---|---|---|
| XENP | HC Identity | HC Substitutions | LC Substitutions | pI | State | # KR | # DE |
| 4547 | IgG1-WT | | | 8.1 | (+6) | 0 | 0 |
| 9493 | IgG1-pI(12) | CH1-pI(6) | Ck-pI(6) | 5.6 | (−30) | (−12) | (+24) |
| 9992 | IgG1-pI(12) | CH1-pI(6) + | Ck-pI(6) | 5.6 | (−30) | (−12) | (+24) |
| | | N434S | | | | | |
| 9993 | IgG1-pI(12) | CH1-pI(6) + | Ck-pI(6) | 5.6 | (−30) | (−12) | (+24) |
| | | M428L/N434S | | | | | |
| 10017 | IgG1-pI(6)- | S119E T164E | N152D S156E | 6.6 | (−6) | 0 | (+12) |
| | Neutral-to-DE | N208D | S202E | | | | |
| 10018 | IgG1-pI(6)-KR- | K133Q K205Q | K126Q K145Q | 6.6 | (−6) | (−12) | 0 |
| | to-Neutral | K210Q | K169Q | | | | |
| 10019 | IgG1-pI(6)-KR- | K133E K205E | K126E K145E | 5.9 | (−18) | (−12) | (+12) |
| | to-DE | K210E | K169E | | | | |

CH1-pI(6) = S119E K133E T164E K205E N208D K210E
Ck-pI(6) = K126E K145E N152D S156E K169E S202E
pI calculated with Fv = Bevacizumab

[0438] The experimental rationale here is as follows. If all the mechanism for improved half-life is based on removal of positive charge, 10018 and 10019 should be as good as 9493 while 10017 would not be extended. If the mechanism is based on an increase in negative charge, 10018 will not be extended, while 10017 and 10019 will have equivalent half-life that is extended relative to IgG1 but shorter than 9493. If overall pI (or charge state) is the basis, the result will be 9493>10019>10017=10018.

[0439] In addition to the charge-controlled variant set, the 9493 IgG1-pI(12) variant was combined with substitutions that improve binding to FcRn at pH 6.0 in order to test whether the two mechanisms of half-life improvement, charge state and FcRn, are compatible. These variants, 9992 IgG1-pI(12)-N434S and 9993 IgG1-pI(12)-M428L/N434S, are listed in Table 4.

[0440] Antibody variants were constructed with the variable region of bevacizumab using molecular biology techniques as described above. Antibodies were expressed, purified, and characterized as described above. PK studies of the variant and control antibodies were carried out in the huFcRn mice as described above. The group mean averages of the serum concentrations are plotted in FIGS. 21 and 22, along with the half-lives obtained from the fits of the data.

[0441] The results indicate that both reducing positive charge and increasing negative charge contribute to improved half-life. In addition, the results indicate that engineered lower pI and increased binding to FcRn can be used in combination to obtain even greater enhancements in half-life. A plot of the half-life vs. pI relationship is provided in FIG. 23 for variant and native IgG's of identical Fv (bevacizumab) that have been tested in the huFcRn mice. The graph illustrates again the inverse relationship between half-life and pI, as well as the combinability of variants engineered for lower pI and Fc variants that improve binding to FcRn.

### Example 6

### New pI-Engineered Constructs

[0442] As described above, efforts can be made to minimize the risk that substitutions that lower pI will elicit immunogenicity by utilizing the isotypic differences between the IgG subclasses (IgG1, IgG2, IgG3, and IgG4). A new set of novel isotypes was designed based on this principal. Again, because immune recognition occurs at a local sequence level, i.e. MHC II and T-cell receptors recognize epitopes typically 9 residues in length, pI-altering substitutions were accompanied by isotypic substitutions proximal in sequence. In this way, epitopes were extended to match a natural isotype. Such substitutions would thus make up epitopes that are present in other human IgG isotypes, and thus would be expected to be tolerized.

[0443] The designed low-pI isotypes, referred to as IgG-pI-Iso2, IgG-pI-Iso2-SL, IgG-pI-Iso2-charges-only, IgG-pI-Iso3, IgG-pI-Iso3-SL, and IgG-pI-Iso3-charges-only are described in Table 5, along with their pI and effector function properties. FIG. 24 provides a sequence alignment of IgG-pI-Iso3 with the native IgG isotypes, and depicts residue identities and residues that reduce pI relative to one or more of the native IgG isotypes. FIGS. 25 and 26 illustrate the structural differences between IgG1 and IgG-pI-Iso3. IgG-pI-Iso2, IgG-pI-Iso2-SL, and IgG-pI-Iso2-charges-only were designed to have low (weak) effector function, as determined by IgG2-like residues in the hinge (233P, 234V, 235A) and CH2 domain (327G). IgG-pI-Iso3, IgG-pI-Iso3-SL, and IgG-pI-Iso3-charges-only were designed to have high (strong) effector function, as determined by IgG1-like residues in the hinge (233E, 234L, 235L, 236G) and CH2 domain (327A). Isotypic low pI variants with the “SL” designation indicate that these variants differ from IgG-pI-Iso2 and IgG-pI-Iso3 by having 192S and 193L. Serine and leucine at these positions were found to be more compatible than 192N/193F due to differences in neighboring residues that are present in IgG1 and IgG2. Low pI isotype variants designated as “charges only” contain charge affecting isotypic substitutions, but do not contain the neighboring non-charge altering substitutions. The novel isotypes can be combined with a native light chain constant region (Ckappa or Clambda), or a variant version engineered with substitutions to further reduce the pI. An example of a pI-engineered light constant chain is a new variant referred to as CK-pI(4), described schematically in FIG. 27. In addition, the novel isotypes can be engineered with Fc variants that improve affinity to FcRn, thereby further enabling extended half-life. Such Fc variants may include, for example 434S or 428L/434S as described in Table 5, or other Fc variants as described herein. Amino acid sequences of IgG-pI-Iso2, IgG-pI-Iso2-SL, IgG-pI-Iso2-charges-only, IgG-pI-Iso3, IgG-pI-Iso3-SL, IgG-pI-Iso3-charges-only and CK-pI(4) are provided in FIG. 28.

TABLE 5
Novel IgG isotypes with low pI

| | | | | | Effector |
|---|---|---|---|---|---|
| XENP | Heavy | Light | Fc variant | pI | Function |
| 10178 | IgG-pI-Iso2 | WT | | 6.3 | Low |
| 10470 | IgG-pI-Iso2-SL | WT | | 6.3 | Low |
| 10180 | IgG-pI-Iso2 | WT | 434S | 6.3 | Low |
| 10471 | IgG-pI-Iso2-SL | WT | 434S | 6.3 | Low |
| 10182 | IgG-pI-Iso2 | CK-pI(4) | | 5.6 | Low |
| 10184 | IgG-pI-Iso2 | CK-pI(4) | 434S | 5.6 | Low |
| 10427 | IgG-pI-Iso2-charges- | WT | | 6.3 | Low |
| | only | | | | |
| 10473 | IgG-pI-Iso2-charges- | WT | 434S | 6.3 | Low |
| | only | | | | |
| 10179 | IgG-pI-Iso3 | WT | | 6.2 | High |
| 10286 | IgG-pI-Iso3-SL | WT | | 6.2 | High |
| 10181 | IgG-pI-Iso3 | WT | 434S | 6.2 | High |
| 10466 | IgG-pI-Iso3-SL | WT | 434S | 6.2 | High |
| 10467 | IgG-pI-Iso3-SL | WT | 428L/ | 6.2 | High |
| | | | 434S | | |
| 10183 | IgG-pI-Iso3 | CK-pI(4) | | 5.5 | High |
| 10185 | IgG-pI-Iso3 | CK-pI(4) | 434S | 5.5 | High |
| 10525 | IgG-pI-Iso3-SL | CK-pI(4) | 434S | 5.5 | High |
| 10426 | IgG-pI-Iso3-charges- | WT | | 6.2 | High |
| | only | | | | |
| 10472 | IgG-pI-Iso3-charges- | WT | 434S | 6.2 | High |
| | only | | | | |

SL = 192S/193L
CK-pI(4) = K126E/K145E/K169E/K207E
pI calculated with Fv = Bevacizumab

[0444] The novel engineered isotypes can be combined with other Fc variants to generate antibodies or Fc fusions with extended half-life and other improved properties. For example, IgG-pI-Iso2-SL and/or IgG-pI-Iso3-SL may incorporate variants 239D, 332E, 267E, and/or 328F that modulate binding to FcγRs to provide enhanced effector function or immunomodulatory properties. The novel isotypes may be combined with other Fc variants that improve binding to FcRn, including for example 428L, 428L/434S, T250Q/M428L, M252Y/S254T/T256E, and N434A/T307Q, thereby potentially further extending in vivo half-life. Exemplary heavy chains are described in Table 6. Such variants may be expressed with a light chain that has a native constant light chain (CK or Cλ), or one that also incorporates constant light chain modifications that reduce pI, including for example any of the engineered constant light chains described herein, including for example CK-pI(4).

TABLE 6
Engineered combinations of pI isotype variants with other variants.

| Heavy | Fc |
|---|---|
| IgG-pI-Iso3-SL | 332E |
| IgG-pI-Iso3-SL | 239D/332E |
| IgG-pI-Iso3-SL | 332E/434S |
| IgG-pI-Iso3-SL | 239D/332E/434S |
| IgG-pI-Iso2-SL | 267E/328F |
| IgG-pI-Iso2-SL | 434S/267E/328F |
| IgG-pI-Iso3-SL | 267E/328F |
| IgG-pI-Iso3-SL | 434S/267E/328F |
| IgG-pI-Iso2-SL | 428L/434S |
| IgG-pI-Iso3-SL | 428L/434S |
| IgG-pI-Iso2-SL | 428L |
| IgG-pI-Iso3-SL | 428L |
| IgG-pI-Iso2-SL | 250Q/428L |
| IgG-pI-Iso3-SL | 250Q/428L |
| IgG-pI-Iso2-SL | 252Y/254T/256E |
| IgG-pI-Iso3-SL | 252Y/254T/256E |
| IgG-pI-Iso2-SL | 434A/307Q |
| IgG-pI-Iso3-SL | 434A/307Q |

[0445] In order to reduce pI even further, additional variant heavy constant chains with reduced pI were designed to minimize mutational load by introducing charge swapping mutations, i.e. where K and R were replaced with D or E, as described above. To aid in the design of these variants, fraction exposed as well as the energy change upon substitution to Glu were calculated for each K and R residue in the Fc region (FIG. 29). These new variants are referred to as pI(7) and pI(11). pI(7) incorporated amino acid modifications K133E, K205E, K210E, K274E, R355E, K392E, and a deletion of the Lys at 447, and pI(11) incorporated amino acid modifications K133E, K205E, K210E, K274E, K320E, K322E, K326E, K334E, R355E, K392E, and a deletion of the Lys at 447 These modifications were introduced into heavy constant chains to result in antibodies with strong effector function, IgG1-pI(7) and IgG1-pI(11), and weak effector function IgG1/2-pI(7) and IgG1/2-pI(11). As can be seen in FIG. 30, as mAb pI gets lower, it requires a greater number of charge swap substitutions to decrease pI further. These pI-engineered variants are described in Table 7, and amino acid sequences are provided in FIG. 28.

TABLE 7
Engineered charge swaps

| | | Fc | | |
|---|---|---|---|---|
| XENP | Heavy | variant | Light | pI |
| 10107 | IgG1-pI(7) | | CK-pI(4) | 5.3 |
| 10108 | IgG1-pI(11) | | CK-pI(4) | 5.0 |
| 10109 | IgG1/2-pI(7) | | CK-pI(4) | 5.4 |
| 10110 | IgG1/2-pI(11) | | CK-pI(4) | 5.0 |
| 10476 | IgG1/2-pI(7) | 434S | CK-pI(4) | 5.4 |

IgG1-pI(7) = K133E/K205E/K210E/K274E/R355E/K392E/K447#
IgG1-pI(11) = K133E/K205E/K210E/K274E/K320E/K322E/K326E/K334E/R355E/K392E/K447#
IgG1/2-pI(7) = K133E/K205E/K210E/Q274E/R355E/K392E/K447#
IgG1/2-pI(11) = K133E/K205E/K210E/Q274E/K320E/K322E/K326E/K334E/R355E/K392E/K447#
CK-pI(4) = K126E/K145E/K169E/K207E
pI calculated with Fv = Bevacizumab

[0446] Antibody variants were constructed with the variable region of bevacizumab using molecular biology techniques as described above. Antibodies were expressed, purified, and characterized as described above. PK studies of the variant and control antibodies were carried out in the huFcRn mice as described above. The group mean averages of the serum concentrations are plotted in FIG. 31 and FIG. 32, along with the half-lives obtained from the fits of the data. Half-lives for individual mice are plotted in FIG. 33. The data clearly demonstrate the additivity of low pI from isotypic pI variants as well as enhanced FcRn binding from the N434S substitution as shown by a plot of half-life vs. pI as shown in FIG. 34.

### Example 7

### Isotypic Light Chain Constant Region Variants

[0447] Homology between CK and CX is not as high as between the IgG subclasses (as shown in FIG. 18), however the sequence and structural homology that exists may still be used to guide substitutions to create an isotypic low-pI light chain constant region. In FIG. 18, positions with residues contributing to a higher pI (K, R, and H) or lower pI (D and E) are highlighted in bold. Gray indicates lysine, arginines, and histidines that may be substituted, preferably with aspartic or glutatmic acids, to lower the isoelectric point. A structural alignment of CK and Cλ was constructed (FIG. 35) and used along with the sequence alignment as a guide to make several CK/Cλ isotypic variants. These pI-engineered variants are described in Table 8, and amino acid sequences are provided in FIG. 28.

TABLE 8
Engineered low-pI variants containing
isotypic light chain constant regions

| | | | | | Effector |
|---|---|---|---|---|---|
| XENP | Heavy | Light | Fc variant | pI | Function |
| 10324 | IgG-pI-Iso3 | CK-Iso(3) | | 5.9 | High |
| 10325 | IgG-pI-Iso3 | CK-Iso(4) | | 5.8 | High |
| 10326 | IgG-pI-Iso3 | CK-Iso(5) | | 5.8 | High |
| 10327 | IgG-pI-Iso3 | CK-Iso(6) | | 5.7 | High |
| 10511 | IgG-pI-Iso3-SL | CK-Iso(3) | | 5.9 | High |
| 10512 | IgG-pI-Iso3-SL | CK-Iso(4) | | 5.8 | High |
| 10513 | IgG-pI-Iso3-SL | CK-Iso(5) | | 5.8 | High |
| 10517 | IgG-pI-Iso3-SL | CK-Iso(3) | 434S | 5.9 | High |
| 10518 | IgG-pI-Iso3-SL | CK-Iso(4) | 434S | 5.8 | High |
| 10519 | IgG-pI-Iso3-SL | CK-Iso(5) | 434S | 5.8 | High |
| 10520 | IgG-pI-Iso3-SL | CK-Iso(3) | 428L/434S | 5.9 | High |
| 10521 | IgG-pI-Iso3-SL | CK-Iso(4) | 428L/434S | 5.8 | High |
| 10522 | IgG-pI-Iso3-SL | CK-Iso(5) | 428L/434S | 5.8 | High |
| 10526 | IgG-pI-Iso3 | CK-Iso(5) | 434S | 5.8 | High |
| 10527 | IgG-pI-Iso2-SL | CK-Iso(5) | 434S | 5.8 | Low |

[0448] Antibody variants were constructed with the variable region of bevacizumab using molecular biology techniques as described above. Antibodies were expressed, purified, and characterized as described above. PK studies of the variant and control antibodies were carried out in the huFcRn mice as described above. The group mean averages of the serum concentrations as well as the half-lives obtained from fits of the data for one of these variants (XENP10519-IgG-pI-Iso3-SL-434S-CK-Iso(5)) are plotted in FIG. 32 and the half-lives for individual mice in FIG. 33. This variant is also included in the correlation plot shown in FIG. 34. The benefit of lower pI due to the CK-Iso(5) light chain is clearly shown.

### Example 8

### Purifying Mixtures of Antibody Variants with Modified Isolectric Points

[0449] Substitutions that modify the antibody isoelectric point may be introduced into one or more chains of an antibody variant to facilitate analysis and purification. For instance, heterodimeric antibodies such as those disclosed in US2011/0054151A1 can be purified by modifying the isolectric point of one chain, so that the multiple species present after expression and Protein A purification can be purified by methods that separate proteins based on differences in charge, such as ion exchange chromatography. An overview of the process using two different heavy chains—one unmodified IgG1, and one with modified isolectric point, is shown in FIG. 38.

[0450] As an example, the heavy chain of bevacizumab was modified by introducing substitutions to lower its isolectric point such that the difference in charges between the three species produced when WT-IgG1-HC, low-pI-HC, and WT-LC are transfected in 293E cells is large enough to facilitate purification by anion exchange chromatography. Clones were created as described above, and transfection and initial purification by Protein A chromatography is also as described above. Sequences of the three chains are listed in FIG. 39 as “Heavy chain 1 of XENP10653”, “Heavy chain 2 of XENP10653”, and “Light chain of XENP10653”. After Protein A purification, three species with nearly identical molecular weights but different charges are obtained. These are the WT-IgG1-HC/WT-IgG1-HC homodimer (pI=8.12), WT-IgG1-HC/low-pI-HC heterodimer (pI=6.89), and low-pI-HC/low-pI-HC homodimer (pI=6.20). The mixture was loaded onto a GE HiTrap Q HP column in 20 mM Tris, pH 7.6 and eluted with a step-wise gradient of NaCl consisting of 50 mM, 100 mM, and finally 200 mM NaCl in the same Tris buffer. Elution was monitored by A280, and each fraction analyzed on Invitrogen pH 3-10 IEF gels with Novex running buffer and these results are shown in FIG. 40. WT-IgG1-HC/WT-IgG1-HC homodimer does not bind to the anion exchange column at pH 7.6 and is thus present in the flowthrough and wash (lanes 1-2). The desired heterodimer elutes with 50 mM NaCl (lane 3), while the low-pI-HC/low-pI-HC homodimer binds tightest to the column and elutes at 100 (lane 4) and 200 mM (lane 5) NaCl. Thus the desired heterodimer variant, which is difficult to purify by other means because of its similar molecular weight to the other two species, is easily purified by the introduction of low pI substitutions into one chain. This method of purifying antibodies by engineering the isoelectric point of each chain can be applied to methods of purifying various bispecific antibody constructs as outlined in FIG. 41 and FIG. 42. The method is particulary useful when the desired species in the mixture has similar molecular weight and other properties such that normal purification techniques are not capable of separating the desired species in high yield. Specific heterodimeric and/or bispecific constructs and sequences with isoelectric points engineered for easy purification are shown in Tables 9 and 10, and FIG. 39, respectively.

TABLE 9
Heterodimeric and/or bispecific constructs with isoelectric points
engineered for easy purification and list of isoelectric points.

| | Calculated pI | | |
|---|---|---|---|
| | Low pI | Hetero- | High pI |
| Protein | Homodimer | dimer | Homodimer |
| XENP10653 | 6.20 | 6.87 | 8.02 |
| Anti-HER2 × anti-CD16 mAb-Fv | 6.07 | 7.31 | 8.47 |
| Anti-CD19 × anti-CD16 mAb-Fv | 5.84 | 6.63 | 8.21 |
| Anti-CD19 × anti-CD32b mAb-Fv | 6.23 | 6.74 | 7.80 |
| Anti-CD40 × anti-CD32b mAb-Fv | 6.54 | 7.46 | 8.22 |
| Anti-HER2 × anti-CD3 mAb-Fv | 7.58 | 8.21 | 8.52 |
| Anti-HER2 × anti-CD3 scFv-Fc | 7.31 | 8.31 | 8.69 |

TABLE 10
Heterodimeric and/or bispecific constructs with
isoelectric points engineered for easy purification
and list of charge state at pH 7.4.

| | Calculated charge state at pH 7.4 | | |
|---|---|---|---|
| | Low pI | Hetero- | High pI |
| Protein | Homodimer | dimer | Homodimer |
| XENP10653 | −12.57 | −3.59 | +5.40 |
| Anti-HER2 × anti-CD16 mAb-Fv | −16.67 | −0.65 | +15.37 |
| Anti-CD19 × anti-CD16 mAb-Fv | −22.68 | −6.66 | +9.36 |
| Anti-CD19 × anti-CD32b mAb-Fv | −14.53 | −5.59 | +3.35 |
| Anti-CD40 × anti-CD32b mAb-Fv | −8.51 | +0.43 | +9.37 |
| Anti-HER2 × anti-CD3 mAb-Fv | +1.25 | +9.32 | +17.40 |
| Anti-HER2 × anti-CD3 scFv-Fc | −0.34 | +6.68 | +13.71 |

### Example 9

### Design of Non-Native Charge Substitutions to Alter pI

[0451] The pI of antibody constant chains were altered by engineering substitutions in the constant domains. Reduced pI can be engineered by making substitutions of basic amino acids (K or R) to acidic amino acids (D or E), which result in the largest decrease in pI. Mutations of basic amino acids to neutral amino acids and neutral amino acids to acidic amino acids will also result in a decrease in pI. Conversely, increased pI can be engineered by making substitutions of acidic amino acids (D or E) to basic amino acids (K or R), which result in the largest increase in pI. Mutations of acidic amino acids to neutral amino acids and neutral amino acids to basic amino acids will also result in a increase in pI. A list of amino acid pK values can be found in Table 1 of Bjellqvist et al., 1994, Electrophoresis 15:529-539.

[0452] In deciding which positions to mutate, the surrounding environment and number of contacts the WT amino acid makes with its neighbors was taken into account such as to minimize the impact of a substitution or set of substitutions on structure and/or function. The solvent accessibility or fraction exposed of each constant region position was calculated using relevant crystal structures. The results are shown in FIG. 43. Based on this analysis, a number of substitutions were identified that reduce or increase pI but are predicted to have minimal impact on the biophysical properties of the domains. Proof of concept results in the context of bevacizumab are shown in FIGS. 44-47 (heavy chain) and FIGS. 48-51 (light chain).

[0453] Calculation of protein pI was performed as follows. First, a count was taken of the number of D, E, C, H, K, R, and Y amino acids as well as the number of N- and C-termini present in the protein. Then, the pI was calculated by identifying the pH for which the protein has an overall charge of zero. This was done by calculating the net charge of the protein at a number of test pH values. Test pH values were set in an iterative manner, stepping up from a low pH of 0 to a high pH of 14 by increments of 0.001 until the charge of the protein reached or surpassed zero. Net charge of a protein at a given pH was calculated by the following formula:

$${q}_{protein} ( p H ) = {\sum }_{i = H , K , R , Ntermini} \frac{{N}_{i}}{1 + {10}^{p H - {pK}_{i}}} - {\sum }_{i = D , E , C , Y , Ctermini} \frac{{N}_{i}}{1 + {10}^{{pK}_{i} - p H}}$$

[0454] where qₚᵣₒₜₑᵢₙ (pH) is the net charge on the protein at the given pH, Nᵢ is the number of amino acid i (or N- or C-termini) present in the protein, and pKᵢ is the pK of amino acid i (or N- or C-termini).

### Example 10

### Isotypic Constant Region Variants

[0455] As described above, efforts can be made to minimize the risk that substitutions that increase or decrease pI will elicit immunogenicity by utilizing the isotypic differences between the IgG subclasses (IgG1, IgG2, IgG3, and IgG4). A new set of novel isotypes was designed based on this principal. If possible, pI-altering substitutions were accompanied by isotypic substitutions proximal in sequence. In this way, epitopes were extended to match a natural isotype. Such substitutions would thus make up epitopes that are present in other human IgG isotypes, and thus would be expected to be tolerized. These new variants are called ISO(−), ISO(+), and ISO(+RR). ISO(−) has reduced pI while ISO(+) and ISO(+RR) have increased pI. A sequence alignment showing the isotypic variation in IgG1, IgG2, IgG3, and IgG4 as well as the sequences of the new isotypic pI variants are shown in FIG. 52. The sequences of these new variants are also shown in isolation and in the context of an anti-VEGF antibody (FIGS. 53-57). All possible combinations of pI lowering isotypic mutations from IgG1, IgG2, IgG3, and IgG4 are shown in FIG. 58. All possible combinations of pI increasing isotypic mutations are shown in FIG. 59.

### Example 11

### Purifying Mixtures of Antibody Variants with Modified Isolectric Points

[0456] As mentioned previously, substitutions that modify the antibody isoelectric point may be introduced into one or more chains of an antibody variant to facilitate analysis and purification. This is especially useful when a preparation of antibody contains a mixture of very similar species as in the case of heterodimeric and/or bispecific constructs that produce a mixture of hetero- and homodimers. In order to demonstrate purification of a nearly identical antibody heterodimer species from the corresponding homodimers, we constructed our isotypic pI variants in the context of the antibody bevacizumab. Variants were constructed by transfecting two different heavy chain DNAs (ISO(−), ISO(+), ISO(+RR), or IgG1(WT)) with the bevacizumab light chain. Variants were first purified by Protein A, and then loaded onto a GE Healthcare HiTrap SP HP cation exchange column in 50 mM MES (pH 6.0) and eluted with an NaCl gradient. Following elution, fractions from each peak were loaded onto a Lonza IsoGel IEF plate (pH range 7-11) for analysis. Data are shown in FIGS. 60-63. As can be seen from the data, separation of the middle pI heterodimer is achieved in each case, with separation improved when the heterodimer has a larger difference in pI from the homodimers.

### Example 12

### Design of Mixtures of Immunoglobulin Variants with Modified Isoelectric Points

[0457] This method of purifying antibodies by engineering the isoelectric point of each chain can be applied to methods of purifying various bispecific antibody constructs. The method is particulary useful when the desired species in the mixture has similar molecular weight and other properties such that normal purification techniques are not capable of separating the desired species in high yield. A schematic of a generic heterodimeric immunoglobulin variant is shown in FIG. 64. Heterodimeric immunoglobulin variants may include VH or VL variable regions in one or more of their chains. Some examples of VH and VL regions that can be used in the construction of heterodimeric immunoglobulin variants are listed in FIG. 65. Specific heterodimeric and/or bispecific constructs and sequences with isoelectric points engineered for easy purification are shown in FIGS. 66-79.

### Example 13

### Purifying Mixtures of Bispecific Immunoglobulin Variants with Modified Isolectric Points

[0458] In order to further demonstrate purification of a nearly identical bispecific heterodimer species from the corresponding homodimers, we constructed our isotypic pI variants in the context of an anti-CD19×anti-CD3 dual scFv-Fc (XENP11355, see FIG. 80), an anti-CD19×anti-CD32b dual scFv-Fc (XENP11139, see FIG. 82), and a second anti-CD19×anti-CD3 dual scFv-Fc (XENP11338, see FIG. 84). Variants were constructed by co-transfecting two different heavy chain DNAs (ISO(−), ISO(+), or ISO(+RR)). Variants were first purified by Protein A, and then loaded onto a GE Healthcare HiTrap SP HP cation exchange column in 50 mM MES (pH 6.0) and eluted with an NaCl gradient. Following elution, fractions from each peak were loaded onto a Lonza IsoGel IEF plate (pH range 3-10) for analysis. Data are shown in FIGS. 81, 83, and 85. As can be seen from the data, efficient separation of the middle pI heterodimer is achieved in each case.

### Example 14

### Purifying Mixtures of Monospecific, Monovalent Immunoglobulin Variants with Modified Isolectric Points

[0459] In order to further demonstrate purification of a nearly identical monospecific, monovalent heterodimer species from the corresponding homodimers, we constructed our isotypic pI variants in the context of an anti-CD40 monovalent mAb (XENP11233, see FIG. 86) and an one-arm anti-CD40 mAb (XENP11238, see FIG. 88). Variants were constructed by co-transfecting two different heavy chain DNAs (ISO(−), ISO(+), or ISO(+RR)). Variants were first purified by Protein A, and then loaded onto a Lonza IsoGel IEF plate (pH range 3-10) for analysis. Data are shown in FIGS. 86 and 88. As can be seen from the data, efficient separation of the middle pI heterodimer is achieved in each case.

The application's sequence listing, which the Patent Office published only in electronic form, follows.

SEQUENCE LISTING (444 sequences)

SEQ ID NO: 1 - protein, 106 aa, Artificial Sequence
  Kappa constant light chain (CK)  (Figure 1)
RTVAAPSVFIFPPSDEQLKSGTASWCLLNNFYPREAKVQWKVDNALQSGNSQESVTEQDSKDSTYSLSSTLTLSKADYEKHKVYACEVTHQGLSSPVTKSFNRGEC

SEQ ID NO: 2 - protein, 329 aa, Artificial Sequence
  lgG1 constant heavy chain (CH1-hinge-CH2-CH3)  (Figure 1)
ASTKGPSVFPLAPSSKSTSGGTAALGCLVKDYFPEPVTVSWNSGALTSGVHTFPAVLQSSGLYSLSSVVTVPSSSLGTQTYICNVNHKPSNTKVDKKVEPKSCDKTHTCPPCPAPELLGGPSVFLFPPKPKDTLMISRTPEVTCVVVDVSHEDPEVKFNWYVDGVEVHNAKTKPREEQYNSTYRWSVLTVLHQDWLNGKEYKCKVSNKALPAPIEKTISKAKGQPREPQVYTLPPSREEMTKNQVSLTCLVKGFYPSDIAVEWESNGQPENNYKTTPPVLDSDGSFFLYSKLTVDKSRWQQGNVFSCSVMHEALHNHYTQKSLSLSPGK

SEQ ID NO: 3 - protein, 325 aa, Artificial Sequence
  lgG2 constant heavy chain (CH1-hinge-CH2-CH3)  (Figure 1)
ASTKGPSVFPLAPCSRSTSESTAALGCLVKDYFPEPVTVSWNSGALTSGVHTFPAVLQSSGLYSLSSVVTVPSSNFGTQTYTCNVDHKPSNTKVDKTVERKCCVECPPCPAPPVAGPSVFLFPPKPKDTLMISRTPEVTCVWDVSHEDPEVQFNWYVDGVEVHNAKTKPREEQFNSTFRVVSVLTVVHQDWLNGKEYKCKVSNKGLPAPIEKTISKTKGQPREPQVYTLPPSREEMTKNQVSLTCLVKGFYPSDIAVEWESNGQPENNYKTTPPMLDSDGSFFLYSKLTVDKSRWQQGNVFSCSVMHEALHNHYTQKSLSLSPGK

SEQ ID NO: 4 - protein, 377 aa, Artificial Sequence
  lgG3 constant heavy chain (CH1-hinge-CH2-CH3)  (Figure 1)
ASTKGPSVFPLAPCSRSTSGGTAALGCLVKDYFPEPVTVSWNSGALTSGVHTFPAVLQSSGLYSLSSVVTVPSSSLGTQTYTCNVNHKPSNTKVDKRVELKTPLGDTTHTCPRCPEPKSCDTPPPCPRCPEPKSCDTPPPCPRCPEPKSCDTPPPCPRCPAPELLGGPSVFLFPPKPKDTLMISRTPEVTCVVVDVSHEDPEVQFKWYVDGVEVHNAKTKPREEQYNSTFRVVSVLTVLHQDWLNGKEYKCKVSNKALPAPIEKTISKTKGQPREPQVYTLPPSREEMTKNQVSLTCLVKGFYPSDIAVEWESSGQPENNYNTTPPMLDSDGSFFLYSKLTVDKSRWQQGNIFSCSVMHEALHNRFTQKSLSLSPGK

SEQ ID NO: 5 - protein, 326 aa, Artificial Sequence
  lgG4 constant heavy chain (CH1-hinge-CH2-CH3)  (Figure 1)
ASTKGPSVFPLAPCSRSTSESTAALGCLVKDYFPEPVTVSWNSGALTSGVHTFPAVLQSSGLYSLSSVVTVPSSSLGTKTYTCNVDHKPSNTKVDKRVESKYGPPCPSCPAPEFLGGPSVFLFPPKPKDTLMISRTPEVTCVWDVSQEDPEVQFNWYVDGVEVHNAKTKPREEQFNSTYRVVSVLTVLHQDWLNGKEYKCKVSNKGLPSSIEKTISKAKGQPREPQVYTLPPSQEEMTKNQVSLTCLVKGFYPSDIAVEWESNGQPENNYKTTPPVLDSDGSFFLYSRLTVDKSRWQEGNVFSCSVMHEALHNHYTQKSLSLSLGK

SEQ ID NO: 6 - protein, 328 aa, Artificial Sequence
  lgG1/2 constant heavy chain (CH1-hinge-CH2-CH3)  (Figure 1)
ASTKGPSVFPLAPSSKSTSGGTAALGCLVKDYFPEPVTVSWNSGALTSGVHTFPAVLQSSGLYSLSSVVTVPSSSLGTQTYICNVNHKPSNTKVDKKVEPKSCDKTHTCPPCPAPPVAGPSVFLFPPKPKDTLMISRTPEVTCVVVDVSHEDPEVQFNWYVDGVEVHNAKTKPREEQFNSTFRWSVLTVVHQDWLNGKEYKCKVSNKGLPAPIEKTISKTKGQPREPQVYTLPPSREEMTKNQVSLTCLVKGFYPSDIAVEWESNGQPENNYKTTPPMLDSDGSFFLYSKLTVDKSRWQQGNVFSCSVMHEALHNHYTQKSLSLSPGK

SEQ ID NO: 7 - protein, 329 aa, Artificial Sequence
  lgG1-CH1-pl(6)  (Figure 4)
AETKGPSVFPLAPSSESTSGGTAALGCLVKDYFPEPVTVSWNSGALESGVHTFPAVLQSSGLYSLSSVVTVPSSSLGTQTYICNVNHEPSDTEVDKKVEPKSCDKTHTCPPCPAPELLGGPSVFLFPPKPKDTLMISRTPEVTCVVVDVSHEDPEVKFNWYVDGVEVHNAKTKPREEQYNSTYRVVSVLTVLHQDWLNGKEYKCKVSNKALPAPIEKTISKAKGQPREPQWTLPPSREEMTKNQVSLTCLVKGFYPSDIAVEWESNGQPENNYKTTPPVLDSDGSFFLYSKLTVDKSRWQQGNVFSCSVMHEALHNHYTQKSLSLSPGK

SEQ ID NO: 8 - protein, 107 aa, Artificial Sequence
  CK-pl(6)  (Figure 4)
RTVAAPSVFIFPPSDEQLESGTASVVCLLNNFYPREAEVQWKVDDALQEGNSQESVTEQDSEDSTYSLSSTLTLSKADYEKHKVYACEVTHQGLESPVTKSFNRGEC

SEQ ID NO: 9 - protein, 123 aa, Artificial Sequence [sequence omitted]

SEQ ID NO: 10 - protein, 107 aa, Artificial Sequence [sequence omitted]

SEQ ID NO: 11 - protein, 453 aa, Artificial Sequence
  Heavy chain of XENP9493 Bevacizumab-lgG1-CH1-pi(6)-CK-pl(6) (Figure 6)
EVQLVESGGGLVQPGGSLRLSCAASGYTFTNYGMNWVRQAPGKGLEWVGWINTYTGEPTYAADFKRRFTFSLDTSKSTAYLQMNSLRAEDTAVYYCAKYPHYYGSSHWYFDVWGQGTLVTVSSAETKGPSVFPLAPSSESTSGGTAALGCLVKDYFPEPVTVSWNSGALESGVHTFPAVLQSSGLYSLSSVVTVPSSSLGTQTYICNVNHEPSDTEVDKKVEPKSCDKTHTCPPCPAPELLGGPSVFLFPPKPKDTLMISRTPEVTCVVVDVSHEDPEVKFNWYVDGVEVHNAKTKPREEQYNSTYRVVSVLTVLHQDWLNGKEYKCKVSNKALPAPIEKTISKAKGQPREPQVYTLPPSREEMTKNQVSLTCLVKGFYPSDIAVEWESNGQPENNYKTTPPVLDSDGSFFLYSKLTVDKSRWQQGNVFSCSVMHEALHNHYTQKSLSLSPGK

SEQ ID NO: 12 - protein, 214 aa, Artificial Sequence
  Light chain of XENP9493 Bevacizumab-lgG1-CH1-pi(6)-CK-pl(6) (Figure 6)
DIQMTQSPSSLSASVGDRVTITCSASQDISNYLNWYQQKPGKAPKVLIYFTSSLHSGVPSRFSGSGSGTDFTLTISSLQPEDFATYYCQQYSTVPWTFGQGTKVEIKRTVAAPSVFIFPPSDEQLESGTASVVCLLNNFYPREAEVQWKVDDALQEGNSQESVTEQDSEDSTYSLSSTLTLSKADYEKHKVYACEVTHQGLESPVTKSFNRGEC

SEQ ID NO: 13 - protein, 328 aa, Artificial Sequence
  pl-iso1  (Figure 19)
ASTKGPSVFPLAPSSKSTSESTAALGCLVKDYFPEPVTVSWNSGALTSGVHTFPAVLQSSGLYSLSSVVTVPSSSLGTQTYTCNVDHKPSNTKVDKTVEPKSCDTTHTCPPCPAPELLGGPSVFLFPPKPKDTLMISRTPEVTCVWDVSQEDPEVQFNWYVDGVEVHNAKTKPREEQYNSTYRVVSVLTVLHQDWLNGKEYKCKVSNKALPAPIEKTISKAKGQPREPQVYTLPPSQEEMTKNQVSLTCLVKGFYPSDIAVEWESSGQPENNYNTTPPMLDSDGSFFLYSKLTVDKSRWQEGNVFSCSVMHEALHNHYTQKSLSLSPG

SEQ ID NO: 14 - protein, 329 aa, Artificial Sequence
  pl-iso1(NF)  (Figure 19)
ASTKGPSVFPLAPSSKSTSESTAALGCLVKDYFPEPVTVSWNSGALTSGVHTFPAVLQSSGLYSLSSVVTVPSSNFGTQTYTCNVDHKPSNTKVDKTVEPKSCDTTHTCPPCPAPELLGGPSVFLFPPKPKDTLMISRTPEVTCVVVDVSQEDPEVQFNWYVDGVEVHNAKTKPREEQYNSTYRVVSVLTVLHQDWLNGKEYKCKVSNKALPAPIEKTISKAKGQPREPQVYTLPPSQEEMTKNQVSLTCLVKGFYPSDIAVEWESSGQPENNYNTTPPMLDSDGSFFLYSKLTVDKSRWQEGNVFSCSVMHEALHNHYTQKSLSLSPG

SEQ ID NO: 15 - protein, 324 aa, Artificial Sequence
  pl-iso1 (NF-VE)  (Figure 19)
ASTKGPSVFPLAPSSKSTSESTAALGCLVKDYFPEPVTVSWNSGALTSGVHTFPAVLQSSGLYSLSSVVTVPSSNFGTQTYTCNVDHKPSNTKVDKTVEPKSCVECPPCPAPELLGGPSVFLFPPKPKDTLMISRTPEVTCVWDVSQEDPEVQFNWYVDGVEVHNAKTKPREEQYNSTYRVVSVLTVLHQDWLNGKEYKCKVSNKALPAPIEKTISKAKGQPREPQWTLPPSQEEMTKNQVSLTCLVKGFYPSDIAVEWESSGQPENNYNTTPPMLDSDGSFFLYSKLTVDKSRWQEGNVFSCSVMHEALHNHYTQKSLSLSPG

SEQ ID NO: 16 - protein, 328 aa, Artificial Sequence
  pl-iso1(NF-VE-DEDE)  (Figure 19)
ASTKGPSVFPLAPSSKSTSESTAALGCLVKDYFPEPVTVSWNSGALTSGVHTFPAVLQSSGLYSLSSVVTVPSSNFGTQTYTCNVDHKPSNTKVDKTVEPKSCVECPPCPAPELLGGPSVFLFPPKPKDTLMISRTPEVTCVWDVSQEDPEVQFNWYVDGVEVHNAKTKPREEQYNSTYRVVSVLTVLHQDWLNGKEYKCKVSNKALPAPIEKTISKAKGQPREPQWTLPPSQEEMTKNQVSLTCLVKGFYPSDIAVEWESSGQPENNYNTTPPMLDSDGSFFLYSKLTVDKSRWQEGNVFSCSVMHEALHNHYTQKSLSLSPGDEDE

SEQ ID NO: 17 - protein, 106 aa, Artificial Sequence
  CK-pl(3)  (Figure 20)
RTVAAPSVFIFPPSDEQLESGTASWCLLNNFYPREAEVQWKVDNALQSGNSQESVTEQDSEDSTYSLSSTLTLSKADYEKHKVYACEVTHQGLSSPVTKSFNRGEC

SEQ ID NO: 18 - protein, 110 aa, Artificial Sequence
  CK-pi(6-DEDE)  (Figure 20)
RTVAAPSVFIFPPSDEQLESGTASWCLLNNFYPREAEVQWKVDDALQEGNSQESVTEQDSEDSTYSLSSTLTLSKADYEKHKVYACEVTHQGLESPVTKSFNRGECDEDE

SEQ ID NO: 19 - protein, 325 aa, Artificial Sequence
  IgG-pi-Iso2  (Figure 28)
ASTKGPSVFPLAPSSKSTSESTAALGCLVKDYFPEPVTVSWNSGALTSGVHTFPAVLQSSGLYSLSSVVTVPSSNFGTQTYTCNVDHKPSNTKVDKTVEPKSCVECPPCPAPPVAGPSVFLFPPKPKDTLMISRTPEVTCVVVDVSHEDPEVQFNWYVDGVEVHNAKTKPREEQFNSTFRVVSVLTVVHQDWLNGKEYKCKVSNKGLPAPIEKTISKTKGQPREPQVYTLPPSQEEMTKNQVSLTCLVKGFYPSDIAVEWESSGQPENNYNTTPPMLDSDGSFFLYSKLTVDKSRWQEGNVFSCSVMHEALHNHYTQKSLSLSPG

SEQ ID NO: 20 - protein, 325 aa, Artificial Sequence
  IgG-pI-Iso2-SL  (Figure 28)
ASTKGPSVFPLAPSSKSTSESTAALGCLVKDYFPEPVTVSWNSGALTSGVHTFPAVLQSSGLYSLSSVVTVPSSSLGTQTYTCNVDHKPSNTKVDKTVEPKSCVECPPCPAPPVAGPSVFLFPPKPKDTLMISRTPEVTCVVVDVSHEDPEVQFNWYVDGVEVHNAKTKPREEQFNSTFRVVSVLTVVHQDWLNGKEYKCKVSNKGLPAPIEKTISKTKGQPREPQVYTLPPSQEEMTKNQVSLTCLVKGFYPSDIAVEWESSGQPENNYNTTPPMLDSDGSFFLYSKLTVDKSRWQEGNVFSCSVMHEALHNHYTQKSLSLSPG

SEQ ID NO: 21 - protein, 324 aa, Artificial Sequence
  IgG-pI-Iso2-charges-only  (Figure 28)
ASTKGPSVFPLAPSSKSTSEGTAALGCLVKDYFPEPVTVSWNSGALTSGVHTFPAVLQSSGLYSLSSVVTVPSSSLGTQTYICNVDHKPSNTKVDKTVEPKSCVECPPCPAPPVAGPSVFLFPPKPKDTLMISRTPEVTCVVVDVSHEDPEVQFNWYVDGVEVHNAKTKPREEQYNSTYRVVSVLTVLHQDWLNGKEYKCKVSNKGLPAPIEKTISKAKGQPREPQWTLPPSQEEMTKNQVSLTCLVKGFYPSDIAVEWESNGQPENNYNTTPPVLDSDGSFFLYSKLTVDKSRWQEGNVFSCSVMHEALHNHYTQKSLSLSPG

SEQ ID NO: 22 - protein, 328 aa, Artificial Sequence
  IgG-pI-Iso3  (Figure 28)
ASTKGPSVFPLAPSSKSTSESTAALGCLVKDYFPEPVTVSWNSGALTSGVHTFPAVLQSSGLYSLSSVVTVPSSNFGTQTYTCNVDHKPSNTKVDKTVEPKSCDTTHTCPPCPAPELLGGPSVFLFPPKPKDTLMISRTPEVTCVVVDVSHEDPEVQFNWYVDGVEVHNAKTKPREEQFNSTFRVVSVLTVVHQDWLNGKEYKCKVSNKALPAPIEKTISKTKGQPREPQWTLPPSQEEMTKNQVSLTCLVKGFYPSDIAVEWESSGQPENNYNTTPPMLDSDGSFFLYSKLTVDKSRWQEGNVFSCSVMHEALHNHYTQKSLSLSPG

SEQ ID NO: 23 - protein, 328 aa, Artificial Sequence
  IgG-pI-Iso3-SL  (Figure 28)
ASTKGPSVFPLAPSSKSTSESTAALGCLVKDYFPEPVTVSWNSGALTSGVHTFPAVLQSSGLYSLSSVVTVPSSSLGTQTYTCNVDHKPSNTKVDKTVEPKSCDTTHTCPPCPAPELLGGPSVFLFPPKPKDTLMISRTPEVTCVVVDVSHEDPEVQFNWYVDGVEVHNAKTKPREEQFNSTFRWSVLTVVHQDWLNGKEYKCKVSNKALPAPIEKTISKTKGQPREPQVYTLPPSQEEMTKNQVSLTCLVKGFYPSDIAVEWESSGQPENNYNTTPPMLDSDGSFFLYSKLTVDKSRWQEGNVFSCSVMHEALHNHYTQKSLSLSPG

SEQ ID NO: 24 - protein, 328 aa, Artificial Sequence
  IgG-pI-Iso3-charges-only  (Figure 28)
ASTKGPSVFPLAPSSKSTSEGTAALGCLVKDYFPEPVTVSWNSGALTSGVHTFPAVLQSSGLYSLSSVVTVPSSSLGTQTYICNVDHKPSNTKVDKTVEPKSCDTTHTCPPCPAPELLGGPSVFLFPPKPKDTLMISRTPEVTCVVVDVSHEDPEVQFNWYVDGVEVHNAKTKPREEQYNSTYRWSVLTVLHQDWLNGKEYKCKVSNKALPAPIEKTISKAKGQPREPQVYTLPPSQEEMTKNQVSLTCLVKGFYPSDIAVEWESNGQPENNYNTTPPVLDSDGSFFLYSKLTVDKSRWQEGNVFSCSVMHEALHNHYTQKSLSLSPG

SEQ ID NO: 25 - protein, 328 aa, Artificial Sequence
  IgG1-pI(7)  (Figure 28)
ASTKGPSVFPLAPSSESTSGGTAALGCLVKDYFPEPVTVSWNSGALTSGVHTFPAVLQSSGLYSLSSVVTVPSSSLGTQTYICNVNHEPSNTEVDKKVEPKSCDKTHTCPPCPAPELLGGPSVFLFPPKPKDTLMISRTPEVTCVVVDVSHEDPEVEFNWYVDGVEVHNAKTKPREEQYNSTYRWSVLTVLHQDWLNGKEYKCKVSNKALPAPIEKTISKAKGQPREPQVYTLPPSEEEMTKNQVSLTCLVKGFYPSDIAVEWESNGQPENNYETTPPVLDSDGSFFLYSKLTVDKSRWQQGNVFSCSVMHEALHNHYTQKSLSLSPG

SEQ ID NO: 26 - protein, 328 aa, Artificial Sequence
  lgG1-pl(11)  (Figure 28)
ASTKGPSVFPLAPSSESTSGGTAALGCLVKDYFPEPVTVSWNSGALTSGVHTFPAVLQSSGLYSLSSVVTVPSSSLGTQTYICNVNHEPSNTEVDKKVEPKSCDKTHTCPPCPAPELLGGPSVFLFPPKPKDTLMISRTPEVTCVVVDVSHEDPEVEFNWYVDGVEVHNAKTKPREEQYNSTYRWSVLTVLHQDWLNGKEYECEVSNEALPAPIEETISKAKGQPREPQVYTLPPSEEEMTKNQVSLTCLVKGFYPSDIAVEWESNGQPENNYETTPPVLDSDGSFFLYSKLTVDKSRWQQGNVFSCSVMHEALHNHYTQKSLSLSPG

SEQ ID NO: 27 - protein, 326 aa, Artificial Sequence
  lgG1/2-pl(7)  (Figure 28)
ASTKGPSVFPLAPSSESTSGGTAALGCLVKDYFPEPVTVSWNSGALTSGVHTFPAVLQSSGLYSLSSVVTVPSSSLGTQTYICNVNHEPSNTEVDKKVEPKSCDKTHTCPPCPAPPVAGPSVFLFPPKPKDTLMISRTPEVTCVVVDVSHEDPEVEFNWYVDGVEVHNAKTKPREEQFNSTFRWSVLTVVHQDWLNGKEYKCKVSNKGLPAPIEKTISKTKGQPREPQWTLPPSEEEMTKNQVSLTCLVKGFYPSDIAVEWESNGQPENNYETTPPMLDSDGSFFLYSKLTVDKSRWQQGNVFSCSVMHEALHNHYTQKSLSLSPG

SEQ ID NO: 28 - protein, 326 aa, Artificial Sequence
  lgG1/2-pl(11)  (Figure 28)
ASTKGPSVFPLAPSSESTSGGTAALGCLVKDYFPEPVTVSWNSGALTSGVHTFPAVLQSSGLYSLSSVVTVPSSSLGTQTYICNVNHEPSNTEVDKKVEPKSCDKTHTCPPCPAPPVAGPSVFLFPPKPKDTLMISRTPEVTCVVVDVSHEDPEVEFNWYVDGVEVHNAKTKPREEQFNSTFRWSVLTVVHQDWLNGKEYECEVSNEGLPAPIEETISKTKGQPREPQWTLPPSEEEMTKNQVSLTCLVKGFYPSDIAVEWESNGQPENNYETTPPMLDSDGSFFLYSKLTVDKSRWQQGNVFSCSVMHEALHNHYTQKSLSLSPG

SEQ ID NO: 29 - protein, 106 aa, Artificial Sequence
  CK-pI(4)  (Figure 28)
RTVAAPSVFIFPPSDEQLESGTASWCLLNNFYPREAEVQWKVDNALQSGNSQESVTEQDSEDSTYSLSSTLTLSKADYEKHKVYACEVTHQGLSSPVTESFNRGEC

SEQ ID NO: 30 - protein, 107 aa, Artificial Sequence
  CK-Iso(3)  (Figure 28)
QTVAAPSVFIFPPSDEQLQSGTASVVCLLNNFYPREAKVQWKVDNALQSGNSQESVTEQDSKDSTYSLSSTLTLSKADYEKHKVYACEVTHEGLSSPVTKSFNRGEC

SEQ ID NO: 31 - protein, 106 aa, Artificial Sequence
  CK-Iso(4)  (Figure 28)
QTVAAPSVFIFPPSDEQLQSGTASWCLLNNFYPREATVQWKVDNALQSGNSQESVTEQDSKDSTYSLSSTLTLSKADYEKHKVYACEVTHEGLSSPVTKSFNRGEC

SEQ ID NO: 32 - protein, 107 aa, Artificial Sequence
  CK-Iso(5)  (Figure 28)
QTVAAPSVFIFPPSDEELQSGTASVVCLLNNFYPREATVQWKVDNALQSGNSQESVTEQDSKDSTYSLSSTLTLSKADYEKHKVYACEVTHEGLSSPVTKSFNRGEC

SEQ ID NO: 33 - protein, 107 aa, Artificial Sequence
  CK-Iso(6)  (Figure 28)
QTVAAPSVFIFPPSDEELQSGTASVVCLLNDFYPREATVQWKVDNALQSGNSQESVTEQDSKDSTYSLSSTLTLSKADYEKHKVYACEVTHEGLSSPVTKSFNRGEC

SEQ ID NO: 34 - protein, 453 aa, Artificial Sequence
  Heavy Chain 1 of XENP1 0653  (Figure 39)
EVQLVESGGGLVQPGGSLRLSCAASGYTFTNYGMNWVRQAPGKGLEWVGWINTYTGEPTYAADFKRRFTFSLDTSKSTAYLQMNSLRAEDTAVYYCAKYPHYYGSSHWYFDVWGQGTLVTVSSASTKGPSVFPLAPSSKSTSGGTAALGCLVKDYFPEPVTVSWNSGALTSGVHTFPAVLQSSGLYSLSSVVTVPSSSLGTQTYICNVNHKPSNTKVDKKVEPKSCDKTHTCPPCPAPELLGGPSVFLFPPKPKDTLMISRTPEVTCVVVDVSHEDPEVKFNWYVDGVEVHNAKTKPREEQYNSTYRVVSVLTVLHQDWLNGKEYKCKVSNKALPAPIEKTISKAKGQPREPQVYTLPPSREEMTKNQVSLTCLVKGFYPSDIAVEWESNGQPENNYKTTPPVLDSDGSFFLYSKLTVDKSRWQQGNVFSCSVMHEALHNHYTQKSLSLSPGK

SEQ ID NO: 35 - protein, 452 aa, Artificial Sequence
  Heavy Chain 2 of XENP1 0653  (Figure 39)
EVQLVESGGGLVQPGGSLRLSCAASGYTFTNYGMNWVRQAPGKGLEWVGWINTYTGEPTYAADFKRRFTFSLDTSKSTAYLQMNSLRAEDTAVYYCAKYPHYYGSSHWYFDVWGQGTLVTVSSASTKGPSVFPLAPSSKSTSGGTAALGCLVKDYFPEPVTVSWNSGALESGVHTFPAVLQSSGLYSLSSVVTVPSSSLGTQTYICNVNHKPSDTEVDKKVEPKSCDKTHTCPPCPAPELLGGPSVFLFPPKPKDTLMISRTPEVTCVVVDVSHEDPEVQFNWYVDGVEVHNAKTKPREEQYNSTYRVVSVLTVLHQDWLNGKEYKCKVSNKALPAPIEKTISKAKGQPREPQVYTLPPSQEEMTKNQVSLTCLVKGFYPSDIAVEWESSGQPENNYNTTPPMLDSDGSFFLYSKLTVDKSRWQEGNVFSCSVMHEALHNHYTQKSLSLSPG

SEQ ID NO: 36 - protein, 214 aa, Artificial Sequence
  Light Chain of XENP1 0653  (Figure 39)
DIQMTQSPSSLSASVGDRVTITCSASQDISNYLNWYQQKPGKAPKVLIYFTSSLHSGVPSRFSGSGSGTDFTLTISSLQPEDFATYYCQQYSTVPWTFGQGTKVEIKRTVAAPSVFIFPPSDEQLKSGTASVVCLLNNFYPREAKVQWKVDNALQSGNSQESVTEQDSKDSTYSLSSTLTLSKADYEKHKVYACEVTHQGLSSPVTKSFNRGEC

SEQ ID NO: 37 - protein, 599 aa, Artificial Sequence
  Heavy Chain 1 of anti-HER2 x anti-CD16 mAb-Fv  (Figure 39)
EVQLVESGGGLVQPGGSLRLSCAASGFNIKDTYIHWVRQAPGKGLEWVARIYPTNGYTRYADSVKGRFTISADTSKNTAYLQMNSLRAEDTAVYYCSRWGGDGFYAMDYWGQGTLVTVSSASTKGPSVFPLAPSSKSTSGGTAALGCLVKDYFPEPVTVSWNSGALTSGVHTFPAVLQSSGLYSLSSVVTVPSSSLGTQTYICNVNHKPSNTKVDKKVEPKSCDKTHTCPPCPAPELLGGPSVFLFPPKPKDTLMISRTPEVTCVVVDVSHEDPEVKFNWYVDGVEVHNAKTKPREEQYNSTYRVVSVLTVLHQDWLNGKEYKCKVSNKALPAPIEKTISKAKGQPREPQVCTLPPSREEMTKNQVHLTCLVKGFYPSDIAVEWESNGQPENNYKTTPPVLDSDGSFALYSKLTVDKSRWQQGNVFSCSVMHEALHNHYTQKSLSLSPGKSSDKTHTSPPSPGGGGSGGGGSGGGGSGGGGQVTLKESGPGILQPSQTLSLTCSFSGFSLRTSGMGVGWIRQPSGKGLEWLAHIWWDDDKRYNPALKSRLTISKDTSSNQVFLKIASVDTADTATYYCAQINPAWFAYWGQGTLVTVSA

SEQ ID NO: 38 - protein, 592 aa, Artificial Sequence
  Heavy Chain 2 of anti-HER2 x anti-CD16 mAb-Fv  (Figure 39)
EVQLVESGGGLVQPGGSLRLSCAASGFNIKDTYIHWVRQAPGKGLEWVARIYPTNGYTRYADSVKGRFTISADTSKNTAYLQMNSLRAEDTAVYYCSRWGGDGFYAMDYWGQGTLVTVSSASTKGPSVFPLAPSSKSTSGGTAALGCLVKDYFPEPVTVSWNSGALESGVHTFPAVLQSSGLYSLSSVVTVPSSSLGTQTYICNVNHKPSDTEVDKKVEPKSCDKTHTCPPCPAPELLGGPSVFLFPPKPKDTLMISRTPEVTCVVVDVSHEDPEVQFNWYVDGVEVHNAKTKPREEQYNSTYRVVSVLTVLHQDWLNGKEYKCKVSNKALPAPIEKTISKAKGQPREPQVTTLPPCQEEMTKNQVSLTCLVKGFYPSDIAVEWESSGQPENNYNTFPPMLDSDGSFFLYSKLTVDKSRWQEGNVFSCSVMHEALHNHYTQKSLSLSPGKSSDKTHTSPPSPGGGGSGGGGSGGGGSGGGGDIVLTQSPASLAVSLGQRATISCKASQSVDFDGDSFMNWYQQKPGQPPKLLIYTTSNLESGIPARFSASGSGTDFTLNIHPVEEEDTATYYCQQSNEDPYTFGGGTKLELK

SEQ ID NO: 39 - protein, 214 aa, Artificial Sequence
  Light Chain of anti-HER2 x anti-CD16 mAb-Fv  (Figure 39)
DIQMTQSPSSLSASVGDRVTITCRASQDVNTAVAWYQQKPGKAPKLLIYSASFLYSGVPSRFSGSRSGTDFTLTISSLQPEDFATYYCQQHYTTPPTFGQGTKVEIKRTVAAPSVFIFPPSDEQLKSGTASVVCLLNNFYPREAKVQWKVDNALQSGNSQESVTEQDSKDSTYSLSSTLTLSKADYEKHKVYACEVTHQGLSSPVTKSFNRGEC

SEQ ID NO: 40 - protein, 599 aa, Artificial Sequence
  Heavy Chain 1 of anti-CD19 x anti-CD16 mAb-Fv  (Figure 39)
EVQLVESGGGLVKPGGSLKLSCAASGYTFTSYVMHWVRQAPGKGLEWIGYINPYNDGTKYNEKFQGRVTISSDKSISTAYMELSSLRSEDTAMYYCARGTYYYGTRVFDYWGQGTLVTVSSASTKGPSVFPLAPSSKSTSGGTAALGCLVKDYFPEPVTVSWNSGALTSGVHTFPAVLQSSGLYSLSSVVTVPSSSLGTQTYICNVNHKPSNTKVDKKVEPKSCDKTHTCPPCPAPELLGGPSVFLFPPKPKDTLMISRTPEVTCVVVDVSHEDPEVKFNWYVDGVEVHNAKTKPREEQYNSTYRWSVLTVLHQDWLNGKEYKCKVSNKALPAPIEKTISKAKGQPREPQVCTLPPSREEMTKNQVHLTCLVKGFYPSDIAVEWESNGQPENNYKTTPPVLDSDGSFALYSKLTVDKSRWQQGNVFSCSVMHEALHNHYTQKSLSLSPGKSSDKTHTSPPSPGGGGSGGGGSGGGGSGGGGQVTLKESGPGILQPSQTLSLTCSFSGFSLRTSGMGVGWIRQPSGKGLEWLAHIWWDDDKRYNPALKSRLTISKDTSSNQVFLKIASVDTADTATYYCAQINPAWFAYWGQGTLVTVSA

SEQ ID NO: 41 - protein, 591 aa, Artificial Sequence
  Heavy Chain 2 of anti-CD19 x anti-CD16 mAb-Fv  (Figure 39)
EVQLVESGGGLVKPGGSLKLSCAASGYTFTSYVMHWVRQAPGKGLEWIGYINPYNDGTKYNEKFQGRVTISSDKSISTAYMELSSLRSEDTAMYYCARGTYYYGTRVFDYWGQGTLVTVSSASTKGPSVFPLAPSSKSTSGGTAALGCLVKDYFPEPVTVSWNSGALESGVHTFPAVLQSSGLYSLSSVVTVPSSSLGTQTYICNVNHKPSDTEVDKKVEPKSCDKTHTCPPCPAPELLGGPSVFLFPPKPKDTLMISRTPEVTCWVDVSHEDPEVQFNWYVDGVEVHNAKTKPREEQYNSTYRWSVLTVLHQDWLNGKEYKCKVSNKALPAPIEKTISKAKGQPREPQVTTLPPCQEEMTKNQVSLTCLVKGFYPSDIAVEWESSGQPENNYNTFPPMLDSDGSFFLYSKLTVDKSRWQEGNVFSCSVMHEALHNHYTQKSLSLSPGKSSDKTHTSPPSPGGGGSGGGGSGGGGSGGGGDIVLTQSPASLAVSLGQRATISCKASQSVDFDGDSFMNWYQQKPGQPPKLLIYTTSNLESGIPARFSASGSGTDFTLNIHPVEEEDTATYYCQQSNEDPYTFGGGTKLELK

SEQ ID NO: 42 - protein, 218 aa, Artificial Sequence
  Light Chain of anti-CD19 x anti-CD16 mAb-Fv  (Figure 39)
DIVMTQSPATLSLSPGERATLSCRSSKSLQNVNGNTYLYWFQQKPGQSPQLLIYRMSNLNSGVPDRFSGSGSGTEFTLTISSLEPEDFAWYCMQHLEYPITFGAGTKLEIKRTVAAPSVFIFPPSDEQLKSGTASVVCLLNNFYPREAKVQWKVDNALQSGNSQESVTEQDSKDSTYSLSSTLTLSKADYEKHKVYACEVTHQGLSSPVTKSFNRGEC

SEQ ID NO: 43 - protein, 599 aa, Artificial Sequence [sequence omitted]

SEQ ID NO: 44 - protein, 589 aa, Artificial Sequence
  Heavy Chain 2 of anti-CD19 x anti-CD32b mAb-Fv  (Figure 39)
EVQLVESGGGLVKPGGSLKLSCAASGYTFTSYVMHWVRQAPGKGLEWIGYINPYNDGTKYNEKFQGRVTISSDKSISTAYMELSSLRSEDTAMYYCARGTYYYGTRVFDYWGQGTLVTVSSASTKGPSVFPLAPSSKSTSGGTAALGCLVKDYFPEPVTVSWNSGALESGVHTFPAVLQSSGLYSLSSVVTVPSSSLGTQTYICNVNHKPSDTEVDKKVEPKSCDKTHTCPPCPAPELLGGPSVFLFPPKPKDTLMISRTPEVTCVVVDVSHEDPEVQFNWYVDGVEVHNAKTKPREEQYNSTYRVVSVLTVLHQDWLNGKEYKCKVSNKALPAPIEKTISKAKGQPREPQVTTLPPCQEEMTKNQVSLTCLVKGFYPSDIAVEWESSGQPENNYNTFPPMLDSDGSFFLYSKLTVDKSRWQEGNVFSCSVMHEALHNHYTQKSLSLSPGKSSDKTHTSPPSPGGGGSGGGGSGGGGSGGGGDVVLTQSPATLSVTPGDSVSLSCRASQGISNNLHWYQQKSHESPRLLIKYASQSISGIPSRFSGSGSGTDFTLSINSVETEDFGMYFCQQSDSWPHTFGGGTKLEIK

SEQ ID NO: 45 - protein, 218 aa, Artificial Sequence; identical to SEQ ID NO: 42
  Light Chain of anti-CD19 x anti-CD32b mAb-Fv  (Figure 39)

SEQ ID NO: 46 - protein, 592 aa, Artificial Sequence [sequence omitted]

SEQ ID NO: 47 - protein, 581 aa, Artificial Sequence
  Heavy Chain 2 of anti-CD40 x anti-CD32b mAb-Fv  (Figure 39)
QVKLEESGPGLVAPSQSLSITCTVSGFSLSRYSVYWVRQPPGKGLEWLGMMWGGGSTDYNSALKSRLSISKDTSKSQVFLKMNSLQTDDTAMYYCVRTDGDYWGQGTSVTVSSASTKGPSVFPLAPSSKSTSGGTAALGCLVKDYFPEPVTVSWNSGALESGVHTFPAVLQSSGLYSLSSVVTVPSSSLGTQTYICNVNHKPSDTEVDKKVEPKSCDKTHTCPPCPAPELLGGPSVFLFPPKPKDTLMISRTPEVTCVVVDVSHEDPEVQFNWYVDGVEVHNAKTKPREEQYNSTYRVVSVLTVLHQDWLNGKEYKCKVSNKALPAPIEKTISKAKGQPREPQVTTLPPCQEEMTKNQVSLTCLVKGFYPSDIAVEWESSGQPENNYNTFPPMLDSDGSFFLYSKLTVDKSRWQEGNVFSCSVMHEALHNHYTQKSLSLSPGKSSDKTHTSPPSPGGGGSGGGGSGGGGSGGGGDVVLTQSPATLSVTPGDSVSLSCRASQGISNNLHWYQQKSHESPRLLIKYASQSISGIPSRFSGSGSGTDFTLSINSVETEDFGMYFCQQSDSWPHTFGGGTKLEIK

SEQ ID NO: 48 - protein, 219 aa, Artificial Sequence
  Light Chain of anti-CD40 x anti-CD32b mAb-Fv  (Figure 39)
ELQLTQSPLSLPVSLGDQASISCRSSQSLVNSNGNTYLHWYLQKPGQSPKLLIYKVSNRFSGVPDRFSGSGSGTDFTLKISRVEAEDLGVYFCSQSTHVPWTFGGGTKLEIKRTVAAPSVFIFPPSDEQLKSGTASVVCLLNNFYPREAKVQWKVDNALQSGNSQESVTEQDSKDSTYSLSSTLTLSKADYEKHKVYACEVTHQGLSSPVTKSFNRGEC

SEQ ID NO: 49 - protein, 600 aa, Artificial Sequence
  Heavy Chain 1 of anti-HER2 x anti-CD3 mAb-Fv  (Figure 39)
EVQLVESGGGLVQPGGSLRLSCAASGFNIKDTYIHWVRQAPGKGLEWVARIYPTNGYTRYADSVKGRFTISADTSKNTAYLQMNSLRAEDTAVYYCSRWGGDGFYAMDYWGQGTLVTVSSASTKGPSVFPLAPSSKSTSGGTAALGCLVKDYFPEPVTVSWNSGALTSGVHTFPAVLQSSGLYSLSSVVTVPSSSLGTQTYICNVNHKPSNTKVDKKVEPKSCDKTHTCPPCPAPELLGGPSVFLFPPKPKDTLMISRTPEVTCVVVDVSHEDPEVKFNWYVDGVEVHNAKTKPREEQYNSTYRVVSVLTVLHQDWLNGKEYKCKVSNKALPAPIEKTISKAKGQPREPQVCTLPPSREEMTKNQVHLTCLVKGFYPSDIAVEWESNGQPENNYKTTPPVLDSDGSFALYSKLTVDKSRWQQGNVFSCSVMHEALHNHYTQKSLSLSPGKSSDKTHTSPPSPGGGGSGGGGSGGGGSGGGGQVQLVQSGAEVKKPGASVKVSCKASGYTFTRYTMHWVRQAPGQGLEWMGYINPSRGYTNYNQKFQGRVTMTTDKSTSTAYMELSSLRSEDTAVYYCARYYDDHYSLDYWGQGTTVTVSS

SEQ ID NO: 50 - protein, 329 aa, Artificial Sequence
  lgG1-434S  (Figure 20)
ASTKGPSVFPLAPSSKSTSGGTAALGCLVKDYFPEPVTVSWNSGALTSGVHTFPAVLQSSGLYSLSSVVTVPSSSLGTQTYICNVNHKPSNTKVDKKVEPKSCDKTHTCPPCPAPELLGGPSVFLFPPKPKDTLMISRTPEVTCVVVDVSHEDPEVKFNWYVDGVEVHNAKTKPREEQYNSTYRWSVLTVLHQDWLNGKEYKCKVSNKALPAPIEKTISKAKGQPREPQVYTLPPSREEMTKNQVSLTCLVKGFYPSDIAVEWESNGQPENNYKTTPPVLDSDGSFFLYSKLTVDKSRWQQGNVFSCSVMHEALHSHYTQKSLSLSPGK

SEQ ID NO: 51 - protein, 325 aa, Artificial Sequence
  lgG2-434S  (Figure 20)
ASTKGPSVFPLAPCSRSTSESTAALGCLVKDYFPEPVTVSWNSGALTSGVHTFPAVLQSSGLYSLSSVVTVPSSNFGTQTYTCNVDHKPSNTKVDKTVERKCCVECPPCPAPPVAGPSVFLFPPKPKDTLMISRTPEVTCVVVDVSHEDPEVQFNWYVDGVEVHNAKTKPREEQFNSTFRWSVLTVVHQDWLNGKEYKCKVSNKGLPAPIEKTISKTKGQPREPQVYTLPPSREEMTKNQVSLTCLVKGFYPSDIAVEWESNGQPENNYKTTPPMLDSDGSFFLYSKLTVDKSRWQQGNVFSCSVMHEALHSHYTQKSLSLSPGK

SEQ ID NO: 52 - protein, 329 aa, Artificial Sequence
  lgG1-CH1-pi(6)-434S  (Figure 4)
AETKGPSVFPLAPSSESTSGGTAALGCLVKDYFPEPVTVSWNSGALESGVHTFPAVLQSSGLYSLSSVVTVPSSSLGTQTYICNVNHEPSDTEVDKKVEPKSCDKTHTCPPCPAPELLGGPSVFLFPPKPKDTLMISRTPEVTCVVVDVSHEDPEVKFNWYVDGVEVHNAKTKPREEQYNSTYRVVSVLTVLHQDWLNGKEYKCKVSNKALPAPIEKTISKAKGQPREPQWTLPPSREEMTKNQVSLTCLVKGFYPSDIAVEWESNGQPENNYKTTPPVLDSDGSFFLYSKLTVDKSRWQQGNVFSCSVMHEALHSHYTQKSLSLSPGK

SEQ ID NO: 53 - protein, 329 aa, Artificial Sequence
  lgG1-CH1-pi(6)-428L/434S  (Figure 4)
AETKGPSVFPLAPSSESTSGGTAALGCLVKDYFPEPVTVSWNSGALESGVHTFPAVLQSSGLYSLSSVVTVPSSSLGTQTYICNVNHEPSDTEVDKKVEPKSCDKTHTCPPCPAPELLGGPSVFLFPPKPKDTLMISRTPEVTCVVVDVSHEDPEVKFNWYVDGVEVHNAKTKPREEQYNSTYRVVSVLTVLHQDWLNGKEYKCKVSNKALPAPIEKTISKAKGQPREPQWTLPPSREEMTKNQVSLTCLVKGFYPSDIAVEWESNGQPENNYKTTPPVLDSDGSFFLYSKLTVDKSRWQQGNVFSCSVLHEALHSHYTQKSLSLSPGK

SEQ ID NO: 54 - protein, 106 aa, Artificial Sequence; identical to SEQ ID NO: 17
  CK-pl(3)  (Figure 20)

SEQ ID NO: 55 - protein, 328 aa, Artificial Sequence
  lgG1-pi(6)-Neutral-to-DE  (Figure 20)
AETKGPSVFPLAPSSKSTSGGTAALGCLVKDYFPEPVTVSWNSGALESGVHTFPAVLQSSGLYSLSSVVTVPSSSLGTQTYICNVNHKPSDTKVDKKVEPKSCDKTHTCPPCPAPELLGGPSVFLFPPKPKDTLMISRTPEVTCVWDVSHEDPEVKFNWYVDGVEVHNAKTKPREEQYNSTYRVVSVLTVLHQDWLNGKEYKCKVSNKALPAPIEKTISKAKGQPREPQWTLPPSREEMTKNQVSLTCLVKGFYPSDIAVEWESNGQPENNYKTTPPVLDSDGSFFLYSKLTVDKSRWQQGNVFSCSVMHEALHNHYTQKSLSLSPGK

SEQ ID NO: 56 - protein, 328 aa, Artificial Sequence
  lgG1-pi(6)-KR-to-Neutral  (Figure 20)
ASTKGPSVFPLAPSSQSTSGGTAALGCLVKDYFPEPVTVSWNSGALTSGVHTFPAVLQSSGLYSLSSVVTVPSSSLGTQTYICNVNHQPSNTQVDKKVEPKSCDKTHTCPPCPAPELLGGPSVFLFPPKPKDTLMISRTPEVTCVWDVSHEDPEVKFNWYVDGVEVHNAKTKPREEQYNSTYRVVSVLTVLHQDWLNGKEYKCKVSNKALPAPIEKTISKAKGQPREPQWTLPPSREEMTKNQVSLTCLVKGFYPSDIAVEWESNGQPENNYKTTPPVLDSDGSFFLYSKLTVDKSRWQQGNVFSCSVMHEALHNHYTQKSLSLSPGK

SEQ ID NO: 57 - protein, 329 aa, Artificial Sequence
  lgG1-pi(6)-KR-to-DE  (Figure 20)
ASTKGPSVFPLAPSSESTSGGTAALGCLVKDYFPEPVTVSWNSGALTSGVHTFPAVLQSSGLYSLSSVVTVPSSSLGTQTYICNVNHEPSNTEVDKKVEPKSCDKTHTCPPCPAPELLGGPSVFLFPPKPKDTLMISRTPEVTCVVVDVSHEDPEVKFNWYVDGVEVHNAKTKPREEQYNSTYRWSVLTVLHQDWLNGKEYKCKVSNKALPAPIEKTISKAKGQPREPQVYTLPPSREEMTKNQVSLTCLVKGFYPSDIAVEWESNGQPENNYKTTPPVLDSDGSFFLYSKLTVDKSRWQQGNVFSCSVMHEALHNHYTQKSLSLSPGK

SEQ ID NO: 58 - protein, 106 aa, Artificial Sequence
  CK-N152D S156E S202E  (Figure 20)
RTVAAPSVFIFPPSDEQLKSGTASWCLLNNFYPREAKVQWKVDDALQEGNSQESVTEQDSKDSTYSLSSTLTLSKADYEKHKVYACEVTHQGLESPVTKSFNRGEC

SEQ ID NO: 59 - protein, 107 aa, Artificial Sequence
  CK-K126Q K145Q K169Q  (Figure 20)
RTVAAPSVFIFPPSDEQLQSGTASVVCLLNNFYPREAQVQWKVDNALQSGNSQESVTEQDSQDSTYSLSSTLTLSKADYEKHKVYACEVTHQGLSSPVTKSFNRGEC

SEQ ID NO: 60 - protein, 106 aa, Artificial Sequence; identical to SEQ ID NO: 17
  CK-K126E K145E K169E  (Figure 20)

SEQ ID NO: 61 - protein, 325 aa, Artificial Sequence
  IgG-pi-Iso2-434S  (Figure 28)
ASTKGPSVFPLAPSSKSTSESTAALGCLVKDYFPEPVTVSWNSGALTSGVHTFPAVLQSSGLYSLSSVVTVPSSSLGTQTYTCNVDHKPSNTKVDKTVEPKSCVECPPCPAPPVAGPSVFLFPPKPKDTLMISRTPEVTCVVVDVSHEDPEVQFNWYVDGVEVHNAKTKPREEQFNSTFRVVSVLTVVHQDWLNGKEYKCKVSNKGLPAPIEKTISKTKGQPREPQVYTLPPSQEEMTKNQVSLTCLVKGFYPSDIAVEWESSGQPENNYNTTPPMLDSDGSFFLYSKLTVDKSRWQEGNVFSCSVMHEALHSHYTQKSLSLSPG

SEQ ID NO: 62 - protein, 327 aa, Artificial Sequence
  IgG-pI-Iso3-434S  (Figure 28)
ASTKGPSVFPLAPSSKSTSESTAALGCLVKDYFPEPVTVSWNSGALTSGVHTFPAVLQSSGLYSLSSVVTVPSSNFGTQTYTCNVDHKPSNTKVDKTVEPKSCDTTHTCPPCPAPELLGGPSVFLFPPKPKDTLMISRTPEVTCVVVDVSHEDPEVQFNWYVDGVEVHNAKTKPREEQFNSTFRWSVLTWHQDWLNGKEYKCKVSNKALPAPIEKTISKTKGQPREPQVYTLPPSQEEMTKNQVSLTCLVKGFYPSDIAVEWESSGQPENNYNTTPPMLDSDGSFFLYSKLTVDKSRWQEGNVFSCSVMHEALHSHYTQKSLSLSPG

SEQ ID NO: 63 - protein, 327 aa, Artificial Sequence
  IgG-pI-Iso3-SL-434S  (Figure 28)
ASTKGPSVFPLAPSSKSTSESTAALGCLVKDYFPEPVTVSWNSGALTSGVHTFPAVLQSSGLYSLSSVVTVPSSSLGTQTYTCNVDHKPSNTKVDKTVEPKSCDTTHTCPPCPAPELLGGPSVFLFPPKPKDTLMISRTPEVTCVVVDVSHEDPEVQFNWYVDGVEVHNAKTKPREEQFNSTFRWSVLTWHQDWLNGKEYKCKVSNKALPAPIEKTISKTKGQPREPQVYTLPPSQEEMTKNQVSLTCLVKGFYPSDIAVEWESSGQPENNYNTTPPMLDSDGSFFLYSKLTVDKSRWQEGNVFSCSVMHEALHSHYTQKSLSLSPG

SEQ ID NO: 64 - protein, 328 aa, Artificial Sequence
  IgG-pI-Iso3-SL  (Figure 28)
ASTKGPSVFPLAPSSKSTSESTAALGCLVKDYFPEPVTVSWNSGALTSGVHTFPAVLQSSGLYSLSSVVTVPSSSLGTQTYTCNVDHKPSNTKVDKTVEPKSCDTTHTCPPCPAPELLGGPSVFLFPPKPKDTLMISRTPEVTCVVVDVSHEDPEVQFNWYVDGVEVHNAKTKPREEQFNSTFRWSVLTVVHQDWLNGKEYKCKVSNKALPAPIEKTISKTKGQPREPQVYTLPPSQEEMTKNQVSLTCLVKGFYPSDIAVEWESSGQPENNYNTTPPMLDSDGSFFLYSKLTVDKSRWQEGNVFSCSVLHEALHSHYTQKSLSLSPG

SEQ ID NO: 65 - protein, 325 aa, Artificial Sequence; identical to SEQ ID NO: 61
  IgG-PI-Iso2-434S  (Figure 28)

SEQ ID NO: 66 - protein, 328 aa, Artificial Sequence
  IgG-pI-Iso3-charges-only-434S  (Figure 28)
ASTKGPSVFPLAPSSKSTSEGTAALGCLVKDYFPEPVTVSWNSGALTSGVHTFPAVLQSSGLYSLSSVVTVPSSSLGTQTYICNVDHKPSNTKVDKTVEPKSCDTTHTCPPCPAPELLGGPSVFLFPPKPKDTLMISRTPEVTCVVVDVSHEDPEVQFNWYVDGVEVHNAKTKPREEQYNSTYRWSVLTVLHQDWLNGKEYKCKVSNKALPAPIEKTISKAKGQPREPQVYTLPPSQEEMTKNQVSLTCLVKGFYPSDIAVEWESNGQPENNYNTTPPVLDSDGSFFLYSKLTVDKSRWQEGNVFSCSVMHEALHSHYTQKSLSLSPG

SEQ ID NO: 67 - protein, 324 aa, Artificial Sequence
  IgG-pI-Iso2-charges-only-434S  (Figure 28)
ASTKGPSVFPLAPSSKSTSEGTAALGCLVKDYFPEPVTVSWNSGALTSGVHTFPAVLQSSGLYSLSSVVTVPSSSLGTQTYICNVDHKPSNTKVDKTVEPKSCVECPPCPAPPVAGPSVFLFPPKPKDTLMISRTPEVTCVVVDVSHEDPEVQFNWYVDGVEVHNAKTKPREEQYNSTYRVVSVLTVLHQDWLNGKEYKCKVSNKGLPAPIEKTISKAKGQPREPQWTLPPSQEEMTKNQVSLTCLVKGFYPSDIAVEWESNGQPENNYNTTPPVLDSDGSFFLYSKLTVDKSRWQEGNVFSCSVMHEALHSHYTQKSLSLSPG

SEQ ID NO: 68 - protein, 328 aa, Artificial Sequence
  lgG1-pi(7)-434S  (Figure 28)
ASTKGPSVFPLAPSSESTSGGTAALGCLVKDYFPEPVTVSWNSGALTSGVHTFPAVLQSSGLYSLSSVVTVPSSSLGTQTYICNVNHEPSNTEVDKKVEPKSCDKTHTCPPCPAPELLGGPSVFLFPPKPKDTLMISRTPEVTCVVVDVSHEDPEVEFNWYVDGVEVHNAKTKPREEQYNSTYRWSVLTVLHQDWLNGKEYKCKVSNKALPAPIEKTISKAKGQPREPQVYTLPPSEEEMTKNQVSLTCLVKGFYPSDIAVEWESNGQPENNYETTPPVLDSDGSFFLYSKLTVDKSRWQQGNVFSCSVMHEALHSHYTQKSLSLSPG

SEQ ID NO: 69 - protein, 326 aa, Artificial Sequence
  lgG1/2_pi(7)-434S  (Figure 28)
ASTKGPSVFPLAPSSESTSGGTAALGCLVKDYFPEPVTVSWNSGALTSGVHTFPAVLQSSGLYSLSSVVTVPSSSLGTQTYICNVNHEPSNTEVDKKVEPKSCDKTHTCPPCPAPPVAGPSVFLFPPKPKDTLMISRTPEVTCVVVDVSHEDPEVEFNWYVDGVEVHNAKTKPREEQFNSTFRWSVLTVVHQDWLNGKEYKCKVSNKGLPAPIEKTISKTKGQPREPQWTLPPSEEEMTKNQVSLTCLVKGFYPSDIAVEWESNGQPENNYETTPPMLDSDGSFFLYSKLTVDKSRWQQGNVFSCSVMHEALHSHYTQKSLSLSPG

SEQ ID NO: 70 - protein, 587 aa, Artificial Sequence
  Heavy Chain 2 of anti-HER2 x anti-CD3 mAb-Fv  (Figure 39)
EVQLVESGGGLVQPGGSLRLSCAASGFNIKDTYIHWVRQAPGKGLEWVARIYPTNGYTRYADSVKGRFTISADTSKNTAYLQMNSLRAEDTAVYYCSRWGGDGFYAMDYWGQGTLVTVSSASTKGPSVFPLAPSSKSTSGGTAALGCLVKDYFPEPVTVSWNSGALESGVHTFPAVLQSSGLYSLSSVVTVPSSSLGTQTYICNVNHKPSDTEVDKKVEPKSCDKTHTCPPCPAPELLGGPSVFLFPPKPKDTLMISRTPEVTCVVVDVSHEDPEVQFNWYVDGVEVHNAKTKPREEQYNSTYRVVSVLTVLHQDWLNGKEYKCKVSNKALPAPIEKTISKAKGQPREPQVTTLPPCQEEMTKNQVSLTCLVKGFYPSDIAVEWESSGQPENNYNTFPPMLDSDGSFFLYSKLTVDKSRWQEGNVFSCSVMHEALHNHYTQKSLSLSPGKSSDKTHTSPPSPGGGGSGGGGSGGGGSGGGGQIVLTQSPATLSLSPGERATLSCRASSSVSYMNWYQQKPGQSPRRLIYDTSKLASGVPARFRGSGSGTDYTLTISSLEPEDFAVYYCQQWSSNPFTFGSGTKLEIK

SEQ ID NO: 71 - protein, 214 aa, Artificial Sequence; identical to SEQ ID NO: 39
  Light Chain of anti-HER2 x anti-CD3 mAb-Fv  (Figure 39)

SEQ ID NO: 72 - protein, 474 aa, Artificial Sequence
  Heavy Chain 1 of anti-HER2 x anti-CD3 scFv-Fc  (Figure 39)
QVQLVQSGAEVKKPGASVKVSCKASGYTFTRYTMHWVRQAPGQGLEWMGYINPSRGYTNYNQKFQGRVTMTTDKSTSTAYMELSSLRSEDTAVYYCARYYDDHYSLDYWGQGTTVTVSSGGGGSGGGGSGGGGSQIVLTQSPATLSLSPGERATLSCRASSSVSYMNWYQQKPGQSPRRLIYDTSKLASGVPARFRGSGSGTDYTLTISSLEPEDFAVYYCQQWSSNPFTFGSGTKLEIKRTEPKSSDKTHTCPPCPAPELLGGPSVFLFPPKPKDTLMISRTPEVTCVVVDVSHEDPEVKFNWYVDGVEVHNAKTKPREEQYNSTYRVVSVLTVLHQDWLNGKEYKCKVSNKALPAPIEKTISKAKGQPREPQVCTLPPSREEMTKNQVHLTCLVKGFYPSDIAVEWESNGQPENNYKTTPPVLDSDGSFALYSKLTVDKSRWQQGNVFSCSVMHEALHNHYTQKSLSLSPGK

SEQ ID NO: 73 - protein, 475 aa, Artificial Sequence
  Heavy Chain 2 of anti-HER2 x anti-CD3 scFv-Fc  (Figure 39)
EVQLVESGGGLVQPGGSLRLSCAASGFNIKDTYIHWVRQAPGKGLEWVARIYPTNGYTRYADSVKGRFTISADTSKNTAYLQMNSLRAEDTAVYYCSRWGGDGFYAMDYWGQGTLVTVSSGGGGSGGGGSGGGGSDIQMTQSPSSLSASVGDRVTITCRASQDVNTAVAWYQQKPGKAPKLLIYSASFLYSGVPSRFSGSRSGTDFTLTISSLQPEDFATYYCQQHYTTPPTFGQGTKVEIKRTEPKSSDKTHTCPPCPAPELLGGPSVFLFPPKPKDTLMISRTPEVTCVWDVSHEDPEVQFNWYVDGVEVHNAKTKPREEQYNSTYRVVSVLTVLHQDWLNGKEYKCKVSNKALPAPIEKTISKAKGQPREPQVTTLPPCQEEMTKNQVSLTCLVKGFYPSDIAVEWESSGQPENNYNTFPPMLDSDGSFFLYSKLTVDKSRWQEGNVFSCSVMHEALHNHYTQKSLSLSPGK

SEQ ID NO: 74 - protein, 329 aa, Artificial Sequence
  ISO(-)  (Figure 53)
ASTKGPSVFPLAPSSKSTSGGTAALGCLVKDYFPEPVTVSWNSGALTSGVHTFPAVLQSSGLYSLSSVVTVPSSSLGTQTYTCNVDHKPSNTKVDKKVEPKSCDKTHTCPPCPAPELLGGPSVFLFPPKPKDTLMISRTPEVTCVVVDVSHEDPEVQFNWYVDGVEVHNAKTKPREEQYNSTYRVVSVLTVLHQDWLNGKEYKCKVSNKALPAPIEKTISKAKGQPREPQVYTLPPSQEEMTKNQVSLTCLVKGFYPSDIAVEWESSGQPENNYNTIPPMLDSDGSFFLYSKLTVDKSRWQEGNVFSCSVMHEALHNHYTQKSLSLSPG

SEQ ID NO: 75 - protein, 330 aa, Artificial Sequence
  ISO(+)  (Figure 53)
ASTKGPSVFPLAPSSKSTSGGTAALGCLVKDYFPEPVTVSWNSGALTSGVHTFPAVLQSSGLYSLSSVVTVPSSSLGTKTYTCNVNHKPSNTKVDKKVEPKSCDKTHTCPPCPAPELLGGPSVFLFPPKPKDTLMISRTPEVTCVVVDVSHEDPEVKFKWYVDGVEVHNAKTKPREEQYNSTYRVVSVLTVLHQDWLNGKEYKCKVSNKALPAPIEKTISKAKGQPREPQVYTLPPSREEMTKNQVSLTCLVKGFYPSDIAVEWESNGQPENNYKTIPPVLDSDGSFFLYSKLTVDKSRWQQGNVFSCSVMHEALHNHYTQKSLSLSPGK

SEQ ID NO: 76 - protein, 330 aa, Artificial Sequence
  ISO(+RR)  (Figure 53)
ASTKGPSVFPLAPSSKSTSGGTAALGCLVKDYFPEPVTVSWNSGALTSGVHTFPAVLQSSGLYSLSSVVTVPSSSLGTKTYTCNVNHKPSNTKVDKKVERKSCDKTHTCPRCPAPELLGGPSVFLFPPKPKDTLMISRTPEVTCVVVDVSHEDPEVKFKWYVDGVEVHNAKTKPREEQYNSTYRVVSVLTVLHQDWLNGKEYKCKVSNKALPAPIEKTISKAKGQPREPQVYTLPPSREEMTKNQVSLTCLVKGFYPSDIAVEWESNGQPENNYKTIPPVLDSDGSFFLYSKLTVDKSRWQQGNVFSCSVMHEALHNHYTQKSLSLSPGK

SEQ ID NO: 77 - protein, 452 aa, Artificial Sequence
  Anti-VEGF ISO(-) Heavy Chain  (Figure 53)
EVQLVESGGGLVQPGGSLRLSCAASGYTFTNYGMNWVRQAPGKGLEWVGWINTYTGEPTYAADFKRRFTFSLDTSKSTAYLQMNSLRAEDTAVYYCAKYPHYYGSSHWYFDVWGQGTLVTVSSASTKGPSVFPLAPSSKSTSGGTAALGCLVKDYFPEPVTVSWNSGALTSGVHTFPAVLQSSGLYSLSSVVTVPSSSLGTQTYTCNVDHKPSNTKVDKKVEPKSCDKTHTCPPCPAPELLGGPSVFLFPPKPKDTLMISRTPEVTCVVVDVSHEDPEVQFNWYVDGVEVHNAKTKPREEQYNSTYRVVSVLTVLHQDWLNGKEYKCKVSNKALPAPIEKTISKAKGQPREPQVYTLPPSQEEMTKNQVSLTCLVKGFYPSDIAVEWESSGQPENNYNTIPPMLDSDGSFFLYSKLTVDKSRWQEGNVFSCSVMHEALHNHYTQKSLSLSPG

SEQ ID NO: 78 - protein, 453 aa, Artificial Sequence
  Anti-VEGF ISO(+) Heavy Chain  (Figure 53)
EVQLVESGGGLVQPGGSLRLSCAASGYTFTNYGMNWVRQAPGKGLEWVGWINTYTGEPTYAADFKRRFTFSLDTSKSTAYLQMNSLRAEDTAVYYCAKYPHYYGSSHWYFDVWGQGTLVTVSSASTKGPSVFPLAPSSKSTSGGTAALGCLVKDYFPEPVTVSWNSGALTSGVHTFPAVLQSSGLYSLSSVVTVPSSSLGTKTYTCNVNHKPSNTKVDKKVEPKSCDKTHTCPPCPAPELLGGPSVFLFPPKPKDTLMISRTPEVTCVVVDVSHEDPEVKFKWYVDGVEVHNAKTKPREEQYNSTYRVVSVLTVLHQDWLNGKEYKCKVSNKALPAPIEKTISKAKGQPREPQVYTLPPSREEMTKNQVSLTCLVKGFYPSDIAVEWESNGQPENNYKTIPPVLDSDGSFFLYSKLTVDKSRWQQGNVFSCSVMHEALHNHYTQKSLSLSPGK

SEQ ID NO: 79 - protein, 453 aa, Artificial Sequence
  Anti-VEGF ISO(+RR) Heavy Chain  (Figure 53)
EVQLVESGGGLVQPGGSLRLSCAASGYTFTNYGMNWVRQAPGKGLEWVGWINTYTGEPTYAADFKRRFTFSLDTSKSTAYLQMNSLRAEDTAVYYCAKYPHYYGSSHWYFDVWGQGTLVTVSSASTKGPSVFPLAPSSKSTSGGTAALGCLVKDYFPEPVTVSWNSGALTSGVHTFPAVLQSSGLYSLSSVVTVPSSSLGTKTYTCNVNHKPSNTKVDKKVERKSCDKTHTCPRCPAPELLGGPSVFLFPPKPKDTLMISRTPEVTCVVVDVSHEDPEVKFKWYVDGVEVHNAKTKPREEQYNSTYRVVSVLTVLHQDWLNGKEYKCKVSNKALPAPIEKTISKAKGQPREPQVYTLPPSREEMTKNQVSLTCLVKGFYPSDIAVEWESNGQPENNYKTIPPVLDSDGSFFLYSKLTVDKSRWQQGNVFSCSVMHEALHNHYTQKSLSLSPGK

SEQ ID NO: 80 - protein, 452 aa, Artificial Sequence
  Heavy Chain 1 of XENP10783 Anti-VEGF ISO(-) x lgGl(WT)  (Figure 54)
EVQLVESGGGLVQPGGSLRLSCAASGYTFTNYGMNWVRQAPGKGLEWVGWINTYTGEPTYAADFKRRFTFSLDTSKSTAYLQMNSLRAEDTAVYYCAKYPHYYGSSHWYFDVWGQGTLVTVSSASTKGPSVFPLAPSSKSTSGGTAALGCLVKDYFPEPVTVSWNSGALTSGVHTFPAVLQSSGLYSLSSVVTVPSSSLGTQTYTCNVDHKPSNTKVDKKVEPKSCDKTHTCPPCPAPELLGGPSVFLFPPKPKDTLMISRTPEVTCVVVDVSHEDPEVQFNWYVDGVEVHNAKTKPREEQYNSTYRVVSVLTVLHQDWLNGKEYKCKVSNKALPAPIEKTISKAKGQPREPQVYTLPPSQEEMTKNQVSLTCLVKGFYPSDIAVEWESSGQPENNYNTTPPMLDSDGSFFLYSKLTVDKSRWQEGNVFSCSVMHEALHNHYTQKSLSLSPG

SEQ ID NO: 81 - protein, 453 aa, Artificial Sequence; identical to SEQ ID NO: 34
  Heavy Chain 2 of XENP10783 Anti-VEGF ISO(-) x lgGl(WT)  (Figure 54)

SEQ ID NO: 82 - protein, 214 aa, Artificial Sequence; identical to SEQ ID NO: 36
  Light Chain of XENP10783 Anti-VEGF ISO(-) x lgGl(WT)  (Figure 54)

SEQ ID NO: 83 - protein, 453 aa, Artificial Sequence; identical to SEQ ID NO: 79
  Heavy Chain 1 of XENP10784 Anti-VEGF ISO(+RR) x lgGl(WT)  (Figure 55)

SEQ ID NO: 84 - protein, 453 aa, Artificial Sequence
  Heavy Chain 2 of XENP10784 Anti-VEGF ISO(+RR) x lgGl(WT)  (Figure 55)
EVQLVESGGGLVQPGGSLRLSCAASGYTFTNYGMNWVRQAPGKGLEWVGWINTYTGEPTYAADFKRRFTFSLDTSKSTAYLQMNSLRAEDTAVYYCAKYPHYYGSSHWYFDVWGQGTLVTVSSASTKGPSVFPLAPSSKSTSGGTAALGCLVKDYFPEPVTVSWNSGALTSGVHTFPAVLQSSGLYSLSSVVTVPSSSLGTQTYICNVNHKPSNTKVDKKVEPKSCDKTHTCPPCPAPELLGGPSVFLFPPKPKDTLMISRTPEVTCVVVDVSHEDPEVKFNWYVDGVEVHNAKTKPREEQYNSTYRVVSVLTVLHQDWLNGKEYKCKVSNKALPAPIEKTISKAKGQPREPQVYTLPPSREEMTKNQVSLTCLVKGFYPSDIAVEWESNGQPENNYKTIPPVLDSDGSFFLYSKLTVDKSRWQQGNVFSCSVMHEALHNHYTQKSLSLSPGK

SEQ ID NO: 85 - protein, 214 aa, Artificial Sequence; identical to SEQ ID NO: 36
  Light Chain of XENP10784 Anti-VEGF ISO(+RR) x lgGl(WT)  (Figure 55)

SEQ ID NO: 86 - protein, 452 aa, Artificial Sequence; identical to SEQ ID NO: 80
  Heavy Chain 1 of XENP10896 Anti-VEGF ISO(-) x ISO(+RR)  (Figure 56)

SEQ ID NO: 87 - protein, 453 aa, Artificial Sequence
  Heavy Chain 2 of XENP10896 Anti-VEGF ISO(-) x ISO(+RR)  (Figure 56)
EVQLVESGGGLVQPGGSLRLSCAASGYTFTNYGMNWVRQAPGKGLEWVGWINTYTGEPTYAADFKRRFTFSLDTSKSTAYLQMNSLRAEDTAVYYCAKYPHYYGSSHWYFDVWGQGTLVTVSSASTKGPSVFPLAPSSKSTSGGTAALGCLVKDYFPEPVTVSWNSGALTSGVHTFPAVLQSSGLYSLSSVVTVPSSSLGTKTYTCNVNHKPSNTKVDKKVERKSCDKTHTCPRCPAPELLGGPSVFLFPPKPKDTLMISRTPEVTCVVVDVSHEDPEVKFKWYVDGVEVHNAKTKPREEQYNSTYRVVSVLTVLHQDWLNGKEYKCKVSNKALPAPIEKTISKAKGQPREPQVYTLPPSREEMTKNQVSLTCLVKGFYPSDIAVEWESNGQPENNYKTTPPVLDSDGSFFLYSKLTVDKSRWQQGNVFSCSVMHEALHNHYTQKSLSLSPGK

SEQ ID NO: 88 - protein, 214 aa, Artificial Sequence; identical to SEQ ID NO: 36
  Light Chain of XENP10896 Anti-VEGF ISO(-) x ISO(+RR)  (Figure 56)

SEQ ID NO: 89 - protein, 452 aa, Artificial Sequence; identical to SEQ ID NO: 80
  Heavy Chain 1 of XENP10901 Anti-VEGF ISO(-) x ISO(+)  (Figure 57)

SEQ ID NO: 90 - protein, 453 aa, Artificial Sequence
  Heavy Chain 2 of XENP10901 Anti-VEGF ISO(-) x ISO(+)  (Figure 57)
EVQLVESGGGLVQPGGSLRLSCAASGYTFTNYGMNWVRQAPGKGLEWVGWINTYTGEPTYAADFKRRFTFSLDTSKSTAYLQMNSLRAEDTAVYYCAKYPHYYGSSHWYFDVWGQGTLVTVSSASTKGPSVFPLAPSSKSTSGGTAALGCLVKDYFPEPVTVSWNSGALTSGVHTFPAVLQSSGLYSLSSVVTVPSSSLGTKTYTCNVNHKPSNTKVDKKVEPKSCDKTHTCPPCPAPELLGGPSVFLFPPKPKDTLMISRTPEVTCVVVDVSHEDPEVKFKWYVDGVEVHNAKTKPREEQYNSTYRVVSVLTVLHQDWLNGKEYKCKVSNKALPAPIEKTISKAKGQPREPQVYTLPPSREEMTKNQVSLTCLVKGFYPSDIAVEWESNGQPENNYKTTPPVLDSDGSFFLYSKLTVDKSRWQQGNVFSCSVMHEALHNHYTQKSLSLSPGK

SEQ ID NO: 91 - protein, 214 aa, Artificial Sequence; identical to SEQ ID NO: 36
  Light Chain of XENP10901 Anti-VEGF ISO(-) x ISO(+)  (Figure 57)

SEQ ID NO: 92 - protein, 125 aa, Artificial Sequence
  Humanized Anti-CD3 VH with Kabat CDRs underlined  (Figure 65)
EVQLVESGGGLVQPGGSLRLSCAASGFTFNTYAMNWVRQAPGKGLEWVGRIRSKYNNYATYYADSVKGRFTISRDDSKNTLYLQMNSLRAEDTAVYYCVRHGNFGNSYVSWFAYWGQGTLVTVSS

SEQ ID NO: 93 - protein, 109 aa, Artificial Sequence
  Humanized Anti-CD3 VL with Kabat CDRs underlined  (Figure 65)
QAVVTQEPSLTVSPGGTVTLTCGSSTGAVTTSNYANWVQQKPGQAPRGLIGGTNKRAPGVPARFSGSLLGGKAALTLSGAQPEDEAEYYCALWYSNLWVFGGGTKLTVL

SEQ ID NO: 94 - protein, 121 aa, Artificial Sequence
  Humanized Anti-CD19 VH with Kabat CDRs underlined  (Figure 65)
EVQLVESGGGLVKPGGSLKLSCAASGYTFTSYVMHWVRQAPGKGLEWIGYINPYNDGTKYNEKFQGRVTISSDKSISTAYMELSSLRSEDTAMYYCARGTYYYGTRVFDYWGQGTLVTVSS

SEQ ID NO: 95 - protein, 112 aa, Artificial Sequence
  Humanized Anti-CD19 VL with Kabat CDRs underlined  (Figure 65)
DIVMTQSPATLSLSPGERATLSCRSSKSLQNVNGNTYLYWFQQKPGQSPQLLIYRMSNLNSGVPDRFSGSGSGTEFTLTISSLEPEDFAVYYCMQHLEYPITFGAGTKLEIK

SEQ ID NO: 96 - protein, 118 aa, Artificial Sequence
  Anti-CD32b VH with Kabat CDRs underlined  (Figure 65)
EVQLVESGGGLVSPGGSLKLSCVASGFAFSSYDMSWVRQTPEKRLEWVAKINSAGGRTNYPDTVKGRFTISRDNAENTLYLQMSSLKSEDTAMYYCAGHSYDYPFTYWGQGTLVTVSA

SEQ ID NO: 97 - protein, 107 aa, Artificial Sequence
  Anti-CD32b VL with Kabat CDRs underlined  (Figure 65)
DVVLTQSPATLSVTPGDSVSLSCRASQGISNNLHWYQQKSHESPRLLIKYASQSISGIPSRFSGSGSGTDFTLSINSVETEDFGMYFCQQSDSWPHTFGGGTKLEIK

SEQ ID NO: 98 - protein, 120 aa, Artificial Sequence
  Anti-CD32b VH with Kabat CDRs underlined  (Figure 65)
EVKVVESGGGLVQPGGSLKLSCAASGFTFSAYSMSWVRQTPEKRLEWVAYITNGGGRTYYPDTVEGRFTISRDNAKNTLYLQMSSLKSEDTAMYYCARHDYYVNYAMDYWGHGTSVTVSS

SEQ ID NO: 99 - protein, 107 aa, Artificial Sequence
  Anti-CD32b VL with Kabat CDRs underlined  (Figure 65)
DIVLIQSPATLSVTPGDSVSLSCRASHTISDNLHWYQQKSHESPRLLIKYASQSISGIPSRFSGSGSGTDFTLSINSVETEDFGMYFCQQSDSWPHTFGAGTKLELK

SEQ ID NO: 100 - protein, 112 aa, Artificial Sequence
  Anti-CD40 VH with Kabat CDRs underlined  (Figure 65)
DIQLQQSGPGLVKPSQSLSLTCSVTGYSITINYNWNWIRQFPGNKLEWMGYIRYDGTSEYTPSLKNRVSITRDTSMNQFFLRLTSVTPEDTATYYCARLDYWGQGTSVTVSS

SEQ ID NO: 101 - protein, 112 aa, Artificial Sequence
  Anti-CD40 VL with Kabat CDRs underlined  (Figure 65)
DAVMTQNPLSLPVSLGDEASISCRSSQSLENSNGNTFLNWFFQKPGQSPQLLIYRVSNRFSGVPDRFSGSGSGTDFTLKISRVEAEDLGVYFCLQVTHVPYTFGGGTILEIK

SEQ ID NO: 102 - protein, 113 aa, Artificial Sequence
  Anti-CD40 VH with Kabat CDRs underlined  (Figure 65)
QVKLEESGPGLVAPSQSLSITCTVSGFSLSRYSVYWVRQPPGKGLEWLGMMWGGGSTDYNSALKSRLSISKDTSKSQVFLKMNSLQTDDTAMYYCVRTDGDYWGQGTSVTVSS

SEQ ID NO: 103 - protein, 112 aa, Artificial Sequence
  Anti-CD40 VL with Kabat CDRs underlined  (Figure 65)
ELQLTQSPLSLPVSLGDQASISCRSSQSLVNSNGNTYLHWYLQKPGQSPKLLIYKVSNRFSGVPDRFSGSGSGTDFTLKISRVEAEDLGVYFCSQSTHVPWTFGGGTKLEIK

SEQ ID NO: 104 - protein, 589 aa, Artificial Sequence
  Heavy Chain 1 of anti-CD19 x anti-CD3 mAb-Fv [HC ISO(-) (VH)] (Figure 66)
EVQLVESGGGLVKPGGSLKLSCAASGYTFTSYVMHWVRQAPGKGLEWIGYINPYNDGTKYNEKFQGRVTISSDKSISTAYMELSSLRSEDTAMYYCARGTYYYGTRVFDYWGQGTLVTVSSASTKGPSVFPLAPSSKSTSGGTAALGCLVKDYFPEPVTVSWNSGALTSGVHTFPAVLQSSGLYSLSSVVTVPSSSLGTQTYTCNVDHKPSNTKVDKKVEPKSCDKTHTCPPCPAPELLGGPSVFLFPPKPKDTLMISRTPEVTCVVVDVSHEDPEVQFNWYVDGVEVHNAKTKPREEQYNSTYRVVSVLTVLHQDWLNGKEYKCKVSNKALPAPIEKTISKAKGQPREPQVYTLPPSQEEMTKNQVSLTCLVKGFYPSDIAVEWESSGQPENNYNTIPPMLDSDGSFFLYSKLTVDKSRWQEGNVFSCSVMHEALHNHYTQKSLSLSPGSSDKTHTSPPSPSGEVQLVESGGGLVQPGGSLRLSCAASGFTFNTYAMNWVRQAPGKGLEWVGRIRSKYNNYATYYADSVKGRFTISRDDSKNTLYLQMNSLRAEDTAVYYCVRHGNFGNSYVSWFAYWGQGTLVTVSS

SEQ ID NO: 105 - protein, 574 aa, Artificial Sequence
  Heavy Chain 2 of anti-CD19 x anti-CD3 mAb-Fv [HC ISO(+RR) (VL)] (Figure 66)
EVQLVESGGGLVKPGGSLKLSCAASGYTFTSYVMHWVRQAPGKGLEWIGYINPYNDGTKYNEKFQGRVTISSDKSISTAYMELSSLRSEDTAMYYCARGTYYYGTRVFDYWGQGTLVTVSSASTKGPSVFPLAPSSKSTSGGTAALGCLVKDYFPEPVTVSWNSGALTSGVHTFPAVLQSSGLYSLSSVVTVPSSSLGTKTYTCNVNHKPSNTKVDKKVERKSCDKTHTCPRCPAPELLGGPSVFLFPPKPKDTLMISRTPEVTCVVVDVSHEDPEVKFKWYVDGVEVHNAKTKPREEQYNSTYRVVSVLTVLHQDWLNGKEYKCKVSNKALPAPIEKTISKAKGQPREPQVYTLPPSREEMTKNQVSLTCLVKGFYPSDIAVEWESNGQPENNYKTIPPVLDSDGSFFLYSKLTVDKSRWQQGNVFSCSVMHEALHNHYTQKSLSLSPGKSSDKTHTSPPSPSGQAVVTQEPSLTVSPGGTVTLTCGSSTGAVTISNYANWVQQKPGQAPRGLIGGTNKRAPGVPARFSGSLLGGKAALTLSGAQPEDEAEYYCALWYSNLWVFGGGTKLTVL

SEQ ID NO: 106 - protein, 219 aa, Artificial Sequence
  Light Chain of anti-CD19 x anti-CD3 mAb-Fv  (Figure 66)
DIVMTQSPATLSLSPGERATLSCRSSKSLQNVNGNTYLYWFQQKPGQSPQLLIYRMSNLNSGVPDRFSGSGSGTEFTLTISSLEPEDFAVYYCMQHLEYPITFGAGTKLEIKRTVAAPSVFIFPPSDEQLKSGTASVVCLLNNFYPREAKVQWKVDNALQSGNSQESVTEQDSKDSTYSLSSTLTLSKADYEKHKVYACEVTHQGLSSPVTKSFNRGEC

SEQ ID NO: 107 - protein, 231 aa, Artificial Sequence
  Heavy Chain 1 of anti-CD19 x anti-CD3 scFv2-Fc [HC ISO(-)] (Figure 67)
EPKSSDKTHTCPPCPAPELLGGPSVFLFPPKPKDTLMISRTPEVTCVVVDVSHEDPEVQFNWYVDGVEVHNAKTKPREEQYNSTYRVVSVLTVLHQDWLNGKEYKCKVSNKALPAPIEKTISKAKGQPREPQVYTLPPSQEEMTKNQVSLTCLVKGFYPSDIAVEWESSGQPENNYNTTPPMLDSDGSFFLYSKLTVDKSRWQEGNVFSCSVMHEALHNHYTQKSLSLSPG

SEQ ID NO: 108 - protein, 735 aa, Artificial Sequence [sequence omitted]

SEQ ID NO: 109 - protein, 483 aa, Artificial Sequence
  Heavy Chain 1 of anti-CD19 x anti-CD3 DART-Fc [HC ISO(-) (anti-CD19 VL/anti-CD3 VH  (Figure 68)
DIVMTQSPATLSLSPGERATLSCRSSKSLQNVNGNTYLYWFQQKPGQSPQLLIYRMSNLNSGVPDRFSGSGSGTEFTLTISSLEPEDFAVYYCMQHLEYPITFGAGTKLEIKGGGGSGGGGSGGGGSEVQLVESGGGLVQPGGSLRLSCAASGFTFNTYAMNWVRQAPGKGLEWVGRIRSKYNNYATYYADSVKGRFTISRDDSKNTLYLQMNSLRAEDTAVYYCVRHGNFGNSYVSWFAYWGQGTLVTVSSEPKSSDKTHTCPPCPAPELLGGPSVFLFPPKPKDTLMISRTPEVTCVVVDVSHEDPEVQFNWYVDGVEVHNAKTKPREEQYNSTYRVVSVLTVLHQDWLNGKEYKCKVSNKALPAPIEKTISKAKGQPREPQVYTLPPSQEEMTKNQVSLTCLVKGFYPSDIAVEWESSGQPENNYNTIPPMLDSDGSFFLYSKLTVDKSRWQEGNVFSCSVMHEALHNHYTQKSLSLSPG

SEQ ID NO: 110 - protein, 477 aa, Artificial Sequence
  Heavy Chain 2 of anti-CD19 x anti-CD3 DART-Fc [HC ISO(+RR) (anti-CD3 VL/anti-CD19 VH)]  (Figure 68)
QAVVTQEPSLTVSPGGTVTLTCGSSTGAVTISNYANWVQQKPGQAPRGLIGGTNKRAPGVPARFSGSLLGGKAALTLSGAQPEDEAEYYCALWYSNLWVFGGGTKLTVLGGGGSGGGGSGGGGSEVQLVESGGGLVKPGGSLKLSCAASGYTFTSYVMHWVRQAPGKGLEWIGYINPYNDGTKYNEKFQGRVTISSDKSISTAYMELSSLRSEDTAMYYCARGTYYYGTRVFDYWGQGTLVTVSSERKSSDKTHTCPRCPAPELLGGPSVFLFPPKPKDTLMISRTPEVTCVVVDVSHEDPEVKFKWYVDGVEVHNAKTKPREEQYNSTYRVVSVLTVLHQDWLNGKEYKCKVSNKALPAPIEKTISKAKGQPREPQVYTLPPSREEMTKNQVSLTCLVKGFYPSDIAVEWESNGQPENNYKTIPPVLDSDGSFFLYSKLTVDKSRWQQGNVFSCSVMHEALHNHYTQKSLSLSPGK

SEQ ID NO: 111 - protein, 479 aa, Artificial Sequence
  Heavy Chain 1 of anti-CD19 x anti-CD3 scFv-Fc [HC ISO(-) (anti-CD19 scFv)J  (Figure 69)
EVQLVESGGGLVKPGGSLKLSCAASGYTFTSYVMHWVRQAPGKGLEWIGYINPYNDGTKYNEKFQGRVTISSDKSISTAYMELSSLRSEDTAMYYCARGTYYYGTRVFDYWGQGTLVTVSSGGGGSGGGGSGGGGSDIVMTQSPATLSLSPGERATLSCRSSKSLQNVNGNTYLYWFQQKPGQSPQLLIYRMSNLNSGVPDRFSGSGSGTEFTLTISSLEPEDFAVYYCMQHLEYPITFGAGTKLEIKEPKSSDKTHTCPPCPAPELLGGPSVFLFPPKPKDTLMISRTPEVTCVVVDVSHEDPEVQFNWYVDGVEVHNAKTKPREEQYNSTYRVVSVLTVLHQDWLNGKEYKCKVSNKALPAPIEKTISKAKGQPREPQVYTLPPSQEEMTKNQVSLTCLVKGFYPSDIAVEWESSGQPENNYNTIPPMLDSDGSFFLYSKLTVDKSRWQEGNVFSCSVMHEALHNHYTQKSLSLSPG

SEQ ID NO: 112 - protein, 481 aa, Artificial Sequence
  Heavy Chain 2 of anti-CD19 x anti-CD3 scFv-Fc [HC ISO(+RR) (anti-CD3 scFv)]  (Figure 69)
EVQLVESGGGLVQPGGSLRLSCAASGFTFNTYAMNWVRQAPGKGLEWVGRIRSKYNNYATYYADSVKGRFTISRDDSKNTLYLQMNSLRAEDTAVYYCVRHGNFGNSYVSWFAYWGQGTLVTVSSGGGGSGGGGSGGGGSQAVVTQEPSLTVSPGGTVTLTCGSSTGAVTISNYANWVQQKPGQAPRGLIGGTNKRAPGVPARFSGSLLGGKAALTLSGAQPEDEAEYYCALWYSNLWVFGGGTKLTVLERKSSDKTHTCPRCPAPELLGGPSVFLFPPKPKDTLMISRTPEVTCVVVDVSHEDPEVKFKWYVDGVEVHNAKTKPREEQYNSTYRVVSVLTVLHQDWLNGKEYKCKVSNKALPAPIEKTISKAKGQPREPQVYTLPPSREEMTKNQVSLTCLVKGFYPSDIAVEWESNGQPENNYKTTPPVLDSDGSFFLYSKLTVDKSRWQQGNVFSCSVMHEALHNHYTQKSLSLSPGK

SEQ ID NO: 113 - protein, 450 aa, Artificial Sequence
  Heavy Chain 1 of anti-CD19 x anti-CD3 mAb-scFv [HC ISO(-)] (Figure 70)
EVQLVESGGGLVKPGGSLKLSCAASGYTFTSYVMHWVRQAPGKGLEWIGYINPYNDGTKYNEKFQGRVTISSDKSISTAYMELSSLRSEDTAMYYCARGTYYYGTRVFDYWGQGTLVTVSSASTKGPSVFPLAPSSKSTSGGTAALGCLVKDYFPEPVTVSWNSGALTSGVHTFPAVLQSSGLYSLSSVVTVPSSSLGTQTYTCNVDHKPSNTKVDKKVEPKSCDKTHTCPPCPAPELLGGPSVFLFPPKPKDTLMISRTPEVTCVVVDVSHEDPEVQFNWYVDGVEVHNAKTKPREEQYNSTYRVVSVLTVLHQDWLNGKEYKCKVSNKALPAPIEKTISKAKGQPREPQVYTLPPSQEEMTKNQVSLTCLVKGFYPSDIAVEWESSGQPENNYNTIPPMLDSDGSFFLYSKLTVDKSRWQEGNVFSCSVMHEALHNHYTQKSLSLSPG

SEQ ID NO: 114 - protein, 710 aa, Artificial Sequence
  Heavy Chain 2 of anti-CD19 x anti-CD3 mAb-scFv [HC ISO(+RR) (scFv)J  (Figure 70)
EVQLVESGGGLVKPGGSLKLSCAASGYTFTSYVMHWVRQAPGKGLEWIGYINPYNDGTKYNEKFQGRVTISSDKSISTAYMELSSLRSEDTAMYYCARGTYYYGTRVFDYWGQGTLVTVSSASTKGPSVFPLAPSSKSTSGGTAALGCLVKDYFPEPVTVSWNSGALTSGVHTFPAVLQSSGLYSLSSVVTVPSSSLGTKTYTCNVNHKPSNTKVDKKVERKSCDKTHTCPRCPAPELLGGPSVFLFPPKPKDTLMISRTPEVTCVVVDVSHEDPEVKFKWYVDGVEVHNAKTKPREEQYNSTYRVVSVLTVLHQDWLNGKEYKCKVSNKALPAPIEKTISKAKGQPREPQVYTLPPSREEMTKNQVSLTCLVKGFYPSDIAVEWESNGQPENNYKTIPPVLDSDGSFFLYSKLTVDKSRWQQGNVFSCSVMHEALHNHYTQKSLSLSPGKGGGGSGGGGSEVQLVESGGGLVQPGGSLRLSCAASGFTFNTYAMNWVRQAPGKGLEWVGRIRSKYNNYATYYADSVKGRFTISRDDSKNTLYLQMNSLRAEDTAVYYCVRHGNFGNSYVSWFAYWGQGTLVTVSSGGGGSGGGGSGGGGSQAVVTQEPSLTVSPGGTVTLTCGSSTGAVTISNYANWVQQKPGQAPRGLIGGTNKRAPGVPARFSGSLLGGKAALTLSGAQPEDEAEYYCALWYSNLWVFGGGTKLTVL

SEQ ID NO: 115 - protein, 219 aa, Artificial Sequence; identical to SEQ ID NO: 106
  Light Chain of anti-CD19 x anti-CD3 mAb-scFv  (Figure 70)

SEQ ID NO: 116 - protein, 450 aa, Artificial Sequence; identical to SEQ ID NO: 113
  Heavy Chain 1 of anti-CD19 x anti-CD3 mAb-dAb [HC ISO(-)] (Figure 71)

SEQ ID NO: 117 - protein, 586 aa, Artificial Sequence
  Heavy Chain 2 of anti-CD19 x anti-CD3 mAb-dAb [ISO(+RR) (scFv)J (Figure 71)
EVQLVESGGGLVKPGGSLKLSCAASGYTFTSYVMHWVRQAPGKGLEWIGYINPYNDGTKYNEKFQGRVTISSDKSISTAYMELSSLRSEDTAMYYCARGTYYYGTRVFDYWGQGTLVTVSSASTKGPSVFPLAPSSKSTSGGTAALGCLVKDYFPEPVTVSWNSGALTSGVHTFPAVLQSSGLYSLSSVVTVPSSSLGTKTYTCNVNHKPSNTKVDKKVERKSCDKTHTCPRCPAPELLGGPSVFLFPPKPKDTLMISRTPEVTCVVVDVSHEDPEVKFKWYVDGVEVHNAKTKPREEQYNSTYRVVSVLTVLHQDWLNGKEYKCKVSNKALPAPIEKTISKAKGQPREPQVYTLPPSREEMTKNQVSLTCLVKGFYPSDIAVEWESNGQPENNYKTIPPVLDSDGSFFLYSKLTVDKSRWQQGNVFSCSVMHEALHNHYTQKSLSLSPGKGGGGSGGGGSEVQLVESGGGLVQPGGSLRLSCAASGFTFNTYAMNWVRQAPGKGLEWVGRIRSKYNNYATYYADSVKGRFTISRDDSKNTLYLQMNSLRAEDTAVYYCVRHGNFGNSYVSWFAYWGQGTLVTVSS

SEQ ID NO: 118 - protein, 219 aa, Artificial Sequence; identical to SEQ ID NO: 106
  Light Chain of anti-CD19 x anti-CD3 mAb-dAb  (Figure 71)

SEQ ID NO: 119 - protein, 566 aa, Artificial Sequence
  Heavy Chain 1 of anti-CD19 x anti-CD3 Fv-Fab-Fc [HC ISO(-) (VL-VL-CL)]  (Figure 72)
DIVMTQSPATLSLSPGERATLSCRSSKSLQNVNGNTYLYWFQQKPGQSPQLLIYRMSNLNSGVPDRFSGSGSGTEFTLTISSLEPEDFAVYYCMQHLEYPITFGAGTKLEIKTVAAPSVFIFPPQAVVTQEPSLTVSPGGTVTLTCGSSTGAVTTSNYANWVQQKPGQAPRGLIGGTNKRAPGVPARFSGSLLGGKAALTLSGAQPEDEAEYYCALWYSNLWVFGGGTKLTVLRTVAAPSVFIFPPSDEQLKSGTASVVCLLNNFYPREAKVQWKVDNALQSGNSQESVTEQDSKDSTYSLSSTLTLSKADYEKHKVYACEVTHQGLSSPVTKSFNRGECDKTHTCPPCPAPELLGGPSVFLFPPKPKDTLMISRTPEVTCVVVDVSHEDPEVQFNWYVDGVEVHNAKTKPREEQYNSTYRVVSVLTVLHQDWLNGKEYKCKVSNKALPAPIEKTISKAKGQPREPQVYTLPPSQEEMTKNQVSLTCLVKGFYPSDIAVEWESSGQPENNYNTIPPMLDSDGSFFLYSKLTVDKSRWQEGNVFSCSVMHEALHNHYTQKSLSLSPG

SEQ ID NO: 120 - protein, 589 aa, Artificial Sequence
  Heavy Chain 2 of anti-CD19 x anti-CD3 Fv-Fab-Fc [HC ISO(+RR) (VH-VH-CHl)]  (Figure 72)
EVQLVESGGGLVKPGGSLKLSCAASGYTFTSYVMHWVRQAPGKGLEWIGYINPYNDGTKYNEKFQGRVTISSDKSISTAYMELSSLRSEDTAMYYCARGTYYYGTRVFDYWGQGTLVTVSSASTKGPSVFPLAPEVQLVESGGGLVQPGGSLRLSCAASGFTFNTYAMNWVRQAPGKGLEWVGRIRSKYNNYATYYADSVKGRFTISRDDSKNTLYLQMNSLRAEDTAVYYCVRHGNFGNSYVSWFAYWGQGTLVTVSSASTKGPSVFPLAPSSKSTSGGTAALGCLVKDYFPEPVTVSWNSGALTSGVHTFPAVLQSSGLYSLSSVVTVPSSSLGTKTYTCNVNHKPSNTKVDKKVERKSSDKTHTCPRCPAPELLGGPSVFLFPPKPKDTLMISRTPEVTCVVVDVSHEDPEVKFKWYVDGVEVHNAKTKPREEQYNSTYRVVSVLTVLHQDWLNGKEYKCKVSNKALPAPIEKTISKAKGQPREPQVYTLPPSREEMTKNQVSLTCLVKGFYPSDIAVEWESNGQPENNYKTIPPVLDSDGSFFLYSKLTVDKSRWQQGNVFSCSVMHEALHNHYTQKSLSLSPGK

SEQ ID NO: 121 - protein, 450 aa, Artificial Sequence; identical to SEQ ID NO: 113
  Heavy Chain 1 of anti-CD19 x anti-CD3 common light chain mAb [HC ISO(-) (anti-CD19 Fab with antiCD19 VH-CH1/anti-CD3 LC)]  (Figure 73)

SEQ ID NO: 122 - protein, 455 aa, Artificial Sequence
  Heavy Chain 2 of anti-CD19 x anti-CD3 common light chain mAb ISO(+RR) [(anti-CD3 Fab with antiCD3 VH-CH1/anti-CD3 LC)l (Figure 73)
EVQLVESGGGLVQPGGSLRLSCAASGFTFNTYAMNWVRQAPGKGLEWVGRIRSKYNNYATYYADSVKGRFTISRDDSKNTLYLQMNSLRAEDTAVYYCVRHGNFGNSYVSWFAYWGQGTLVTVSSASTKGPSVFPLAPSSKSTSGGTAALGCLVKDYFPEPVTVSWNSGALTSGVHTFPAVLQSSGLYSLSSVVTVPSSSLGTKTYTCNVNHKPSNTKVDKKVERKSCDKTHTCPRCPAPELLGGPSVFLFPPKPKDTLMISRTPEVTCVVVDVSHEDPEVKFKWYVDGVEVHNAKTKPREEQYNSTYRVVSVLTVLHQDWLNGKEYKCKVSNKALPAPIEKTISKAKGQPREPQVYTLPPSREEMTKNQVSLTCLVKGFYPSDIAVEWESNGQPENNYKTIPPVLDSDGSFFLYSKLTVDKSRWQQGNVFSCSVMHEALHNHYTQKSLSLSPGK

SEQ ID NO: 123 - protein, 216 aa, Artificial Sequence
  Light Chain of anti-CD19 x anti-CD3 common light chain mAb (Figure 73)
QAVVTQEPSLTVSPGGTVTLTCGSSTGAVTISNYANWVQQKPGQAPRGLIGGTNKRAPGVPARFSGSLLGGKAALTLSGAQPEDEAEYYCALWYSNLWVFGGGTKLTVLRTVAAPSVFIFPPSDEQLKSGTASVVCLLNNFYPREAKVQWKVDNALQSGNSQESVTEQDSKDSTYSLSSTLTLSKADYEKHKVYACEVTHQGLSSPVTKSFNRGEC

SEQ ID NO: 124 - protein, 231 aa, Artificial Sequence; identical to SEQ ID NO: 107
  Heavy Chain 1 of anti-CD3 one-arm mAb [HC ISO(-)]  (Figure 74)

SEQ ID NO: 125 - protein, 455 aa, Artificial Sequence
  Heavy Chain 2 of anti-CD3 one-arm mAb [HC ISO(+RR) (anti-CD3 Fab)]  (Figure 74)
EVQLVESGGGLVQPGGSLRLSCAASGFTFNTYAMNWVRQAPGKGLEWVGRIRSKYNNYATYYADSVKGRFTISRDDSKNTLYLQMNSLRAEDTAVYYCVRHGNFGNSYVSWFAYWGQGTLVTVSSASTKGPSVFPLAPSSKSTSGGTAALGCLVKDYFPEPVTVSWNSGALTSGVHTFPAVLQSSGLYSLSSVVTVPSSSLGTKTYTCNVNHKPSNTKVDKKVERKSCDKTHTCPRCPAPELLGGPSVFLFPPKPKDTLMISRTPEVTCVVVDVSHEDPEVKFKWYVDGVEVHNAKTKPREEQYNSTYRVVSVLTVLHQDWLNGKEYKCKVSNKALPAPIEKTISKAKGQPREPQVYTLPPSREEMTKNQVSLTCLVKGFYPSDIAVEWESNGQPENNYKTTPPVLDSDGSFFLYSKLTVDKSRWQQGNVFSCSVMHEALHNHYTQKSLSLSPGK

SEQ ID NO: 126 - protein, 216 aa, Artificial Sequence
  Light Chain of anti-CD3 one-arm mAb  (Figure 74)
QAVVTQEPSLTVSPGGTVTLTCGSSTGAVTTSNYANWVQQKPGQAPRGLIGGTNKRAPGVPARFSGSLLGGKAALTLSGAQPEDEAEYYCALWYSNLWVFGGGTKLTVLRTVAAPSVFIFPPSDEQLKSGTASVVCLLNNFYPREAKVQWKVDNALQSGNSQESVTEQDSKDSTYSLSSTLTLSKADYEKHKVYACEVTHQGLSSPVTKSFNRGEC

SEQ ID NO: 127 - protein, 571 aa, Artificial Sequence
  Heavy Chain 1 of anti-CD19 x anti-CD3 Fab-Fv-Fc [HC ISO(-) (VL-CL-VL)]  (Figure 75)
DIVMTQSPATLSLSPGERATLSCRSSKSLQNVNGNTYLYWFQQKPGQSPQLLIYRMSNLNSGVPDRFSGSGSGTEFTLTISSLEPEDFAVYYCMQHLEYPITFGAGTKLEIKRTVAAPSVFIFPPSDEQLKSGTASVVCLLNNFYPREAKVQWKVDNALQSGNSQESVTEQDSKDSTYSLSSTLTLSKADYEKHKVYACEVTHQGLSSPVTKSFNRGECTVAAPSVFIFPPQAVVTQEPSLTVSPGGTVTLTCGSSTGAVTTSNYANWVQQKPGQAPRGLIGGTNKRAPGVPARFSGSLLGGKAALTLSGAQPEDEAEYYCALWYSNLWVFGGGTKLTVLEPKSSDKTHTCPPCPAPELLGGPSVFLFPPKPKDTLMISRTPEVTCVVVDVSHEDPEVQFNWYVDGVEVHNAKTKPREEQYNSTYRVVSVLTVLHQDWLNGKEYKCKVSNKALPAPIEKTISKAKGQPREPQVYTLPPSQEEMTKNQVSLTCLVKGFYPSDIAVEWESSGQPENNYNTIPPMLDSDGSFFLYSKLTVDKSRWQEGNVFSCSVMHEALHNHYTQKSLSLSPG

SEQ ID NO: 128 - protein, 594 aa, Artificial Sequence
  Heavy Chain 2 of anti-CD19 x anti-CD3 Fab-Fv-Fc [HC ISO(+RR) (VH-CHl-VH)]  (Figure 75)
EVQLVESGGGLVKPGGSLKLSCAASGYTFTSYVMHWVRQAPGKGLEWIGYINPYNDGTKYNEKFQGRVTISSDKSISTAYMELSSLRSEDTAMYYCARGTYYYGTRVFDYWGQGTLVTVSSASTKGPSVFPLAPSSKSTSGGTAALGCLVKDYFPEPVTVSWNSGALTSGVHTFPAVLQSSGLYSLSSVVTVPSSSLGTKTYTCNVNHKPSNTKVDKKVERKSCASTKGPSVFPLAPEVQLVESGGGLVQPGGSLRLSCAASGFTFNTYAMNWVRQAPGKGLEWVGRIRSKYNNYATYYADSVKGRFTISRDDSKNTLYLQMNSLRAEDTAVYYCVRHGNFGNSYVSWFAYWGQGTLVTVSSERKSSDKTHTCPRCPAPELLGGPSVFLFPPKPKDTLMISRTPEVTCVVVDVSHEDPEVKFKWYVDGVEVHNAKTKPREEQYNSTYRVVSVLTVLHQDWLNGKEYKCKVSNKALPAPIEKTISKAKGQPREPQVYTLPPSREEMTKNQVSLTCLVKGFYPSDIAVEWESNGQPENNYKTIPPVLDSDGSFFLYSKLTVDKSRWQQGNVFSCSVMHEALHNHYTQKSLSLSPGK

SEQ ID NO: 129 - protein, 464 aa, Artificial Sequence
  Heavy Chain 1 of anti-CD19 x anti-CD3 Fv-Fv-Fc [HC ISO(-) (VL-VL)]  (Figure 76)
DIVMTQSPATLSLSPGERATLSCRSSKSLQNVNGNTYLYWFQQKPGQSPQLLIYRMSNLNSGVPDRFSGSGSGTEFTLTISSLEPEDFAVYYCMQHLEYPITFGAGTKLEIKTVAAPSVFIFPPQAVVTQEPSLTVSPGGTVTLTCGSSTGAVTTSNYANWVQQKPGQAPRGLIGGTNKRAPGVPARFSGSLLGGKAALTLSGAQPEDEAEYYCALWYSNLWVFGGGTKLTVLEPKSSDKTHTCPPCPAPELLGGPSVFLFPPKPKDTLMISRTPEVTCVVVDVSHEDPEVQFNWYVDGVEVHNAKTKPREEQYNSTYRVVSVLTVLHQDWLNGKEYKCKVSNKALPAPIEKTISKAKGQPREPQVYTLPPSQEEMTKNQVSLTCLVKGFYPSDIAVEWESSGQPENNYNTIPPMLDSDGSFFLYSKLTVDKSRWQEGNVFSCSVMHEALHNHYTQKSLSLSPG

SEQ ID NO: 130 - protein, 491 aa, Artificial Sequence
  Heavy Chain 2 of anti-CD19 x anti-CD3 Fv-Fv-Fc [HC ISO(+RR) (VH-VH)]  (Figure 76)
EVQLVESGGGLVKPGGSLKLSCAASGYTFTSYVMHWVRQAPGKGLEWIGYINPYNDGTKYNEKFQGRVTISSDKSISTAYMELSSLRSEDTAMYYCARGTYYYGTRVFDYWGQGTLVTVSSASTKGPSVFPLAPEVQLVESGGGLVQPGGSLRLSCAASGFTFNTYAMNWVRQAPGKGLEWVGRIRSKYNNYATYYADSVKGRFTISRDDSKNTLYLQMNSLRAEDTAVYYCVRHGNFGNSYVSWFAYWGQGTLVTVSSERKSSDKTHTCPRCPAPELLGGPSVFLFPPKPKDTLMISRTPEVTCVVVDVSHEDPEVKFKWYVDGVEVHNAKTKPREEQYNSTYRVVSVLTVLHQDWLNGKEYKCKVSNKALPAPIEKTISKAKGQPREPQVYTLPPSREEMTKNQVSLTCLVKGFYPSDIAVEWESNGQPENNYKTIPPVLDSDGSFFLYSKLTVDKSRWQQGNVFSCSVMHEALHNHYTQKSLSLSPGK

SEQ ID NO: 131 - protein, 442 aa, Artificial Sequence
  Heavy Chain 1 of anti-CD3 monovalent mAb [HC ISO(-) (VL-CL)] (Figure 77)
QAVVTQEPSLTVSPGGTVTLTCGSSTGAVTTSNYANWVQQKPGQAPRGLIGGTNKRAPGVPARFSGSLLGGKAALTLSGAQPEDEAEYYCALWYSNLWVFGGGTKLTVLRTVAAPSVFIFPPSDEQLKSGTASVVCLLNNFYPREAKVQWKVDNALQSGNSQESVTEQDSKDSTYSLSSTLTLSKADYEKHKVYACEVTHQGLSSPVTKSFNRGECDKTHTCPPCPAPELLGGPSVFLFPPKPKDTLMISRTPEVTCVVVDVSHEDPEVQFNWYVDGVEVHNAKTKPREEQYNSTYRVVSVLTVLHQDWLNGKEYKCKVSNKALPAPIEKTISKAKGQPREPQVYTLPPSQEEMTKNQVSLTCLVKGFYPSDIAVEWESSGQPENNYNTIPPMLDSDGSFFLYSKLTVDKSRWQEGNVFSCSVMHEALHNHYTQKSLSLSPG

SEQ ID NO: 132 - protein, 455 aa, Artificial Sequence; identical to SEQ ID NO: 122
  Heavy Chain 2 of anti-CD3 monovalent mAb [HC ISO(+RR) (VH-CHl)] (Figure 77)

SEQ ID NO: 133 - protein, 593 aa, Artificial Sequence
  Heavy Chain 1 of anti-CD19 x anti-CD3 central Fv [HC ISO(-) (Fab-VH)J  (Figure 78)
EVQLVESGGGLVKPGGSLKLSCAASGYTFTSYVMHWVRQAPGKGLEWIGYINPYNDGTKYNEKFQGRVTISSDKSISTAYMELSSLRSEDTAMYYCARGTYYYGTRVFDYWGQGTLVTVSSASTKGPSVFPLAPSSKSTSGGTAALGCLVKDYFPEPVTVSWNSGALTSGVHTFPAVLQSSGLYSLSSVVTVPSSSLGTQTYTCNVDHKPSNTKVDKKVEPKSCASTKGPSVFPLAPEVQLVESGGGLVQPGGSLRLSCAASGFTFNTYAMNWVRQAPGKGLEWVGRIRSKYNNYATYYADSVKGRFTISRDDSKNTLYLQMNSLRAEDTAVYYCVRHGNFGNSYVSWFAYWGQGTLVTVSSEPKSSDKTHTCPPCPAPELLGGPSVFLFPPKPKDTLMISRTPEVTCVVVDVSHEDPEVQFNWYVDGVEVHNAKTKPREEQYNSTYRVVSVLTVLHQDWLNGKEYKCKVSNKALPAPIEKTISKAKGQPREPQVYTLPPSQEEMTKNQVSLTCLVKGFYPSDIAVEWESSGQPENNYNTTPPMLDSDGSFFLYSKLTVDKSRWQEGNVFSCSVMHEALHNHYTQKSLSLSPG

SEQ ID NO: 134 - protein, 577 aa, Artificial Sequence
  Heavy Chain 2 of anti-CD19 x anti-CD3 central Fv [HC ISO(+RR) (Fab-VL)J  (Figure 78)
EVQLVESGGGLVKPGGSLKLSCAASGYTFTSYVMHWVRQAPGKGLEWIGYINPYNDGTKYNEKFQGRVTISSDKSISTAYMELSSLRSEDTAMYYCARGTYYYGTRVFDYWGQGTLVTVSSASTKGPSVFPLAPSSKSTSGGTAALGCLVKDYFPEPVTVSWNSGALTSGVHTFPAVLQSSGLYSLSSVVTVPSSSLGTKTYTCNVNHKPSNTKVDKKVEPKSCTVAAPSVFIFPPQAVVTQEPSLTVSPGGTVTLTCGSSTGAVTTSNYANWVQQKPGQAPRGLIGGTNKRAPGVPARFSGSLLGGKAALTLSGAQPEDEAEYYCALWYSNLWVFGGGTKLTVLERKSSDKTHTCPRCPAPELLGGPSVFLFPPKPKDTLMISRTPEVTCVVVDVSHEDPEVKFKWYVDGVEVHNAKTKPREEQYNSTYRVVSVLTVLHQDWLNGKEYKCKVSNKALPAPIEKTISKAKGQPREPQVYTLPPSREEMTKNQVSLTCLVKGFYPSDIAVEWESNGQPENNYKTTPPVLDSDGSFFLYSKLTVDKSRWQQGNVFSCSVMHEALHNHYTQKSLSLSPGK

SEQ ID NO: 135 - protein, 219 aa, Artificial Sequence; identical to SEQ ID NO: 106
  Light Chain of anti-CD19 x anti-CD3 central Fv  (Figure 78)

SEQ ID NO: 136 - protein, 673 aa, Artificial Sequence
  Heavy Chain 1 of anti-CD19 x anti-CD3 Fab-Fab-Fc [HC ISO(-) (VL-CL-VL-CL)]  (Figure 79)
DIVMTQSPATLSLSPGERATLSCRSSKSLQNVNGNTYLYWFQQKPGQSPQLLIYRMSNLNSGVPDRFSGSGSGTEFTLTISSLEPEDFAVYYCMQHLEYPITFGAGTKLEIKRTVAAPSVFIFPPSDEQLKSGTASVVCLLNNFYPREAKVQWKVDNALQSGNSQESVTEQDSKDSTYSLSSTLTLSKADYEKHKVYACEVTHQGLSSPVTKSFNRGECTVAAPSVFIFPPQAVVTQEPSLTVSPGGTVTLTCGSSTGAVTTSNYANWVQQKPGQAPRGLIGGTNKRAPGVPARFSGSLLGGKAALTLSGAQPEDEAEYYCALWYSNLWVFGGGTKLTVLRTVAAPSVFIFPPSDEQLKSGTASVVCLLNNFYPREAKVQWKVDNALQSGNSQESVTEQDSKDSTYSLSSTLTLSKADYEKHKVYACEVTHQGLSSPVTKSFNRGECDKTHTCPPCPAPELLGGPSVFLFPPKPKDTLMISRTPEVTCVVVDVSHEDPEVQFNWYVDGVEVHNAKTKPREEQYNSTYRVVSVLTVLHQDWLNGKEYKCKVSNKALPAPIEKTISKAKGQPREPQVYTLPPSQEEMTKNQVSLTCLVKGFYPSDIAVEWESSGQPENNYNTIPPMLDSDGSFFLYSKLTVDKSRWQEGNVFSCSVMHEALHNHYTQKSLSLSPG

SEQ ID NO: 137 - protein, 692 aa, Artificial Sequence
  Heavy Chain 2 of anti-CD19 x anti-CD3 Fab-Fab-Fc [HC ISO(+RR) (VH-CHl-VH-CHl)]  (Figure 79)
EVQLVESGGGLVKPGGSLKLSCAASGYTFTSYVMHWVRQAPGKGLEWIGYINPYNDGTKYNEKFQGRVTISSDKSISTAYMELSSLRSEDTAMYYCARGTYYYGTRVFDYWGQGTLVTVSSASTKGPSVFPLAPSSKSTSGGTAALGCLVKDYFPEPVTVSWNSGALTSGVHTFPAVLQSSGLYSLSSVVTVPSSSLGTKTYTCNVNHKPSNTKVDKKVERKSCASTKGPSVFPLAPEVQLVESGGGLVQPGGSLRLSCAASGFTFNTYAMNWVRQAPGKGLEWVGRIRSKYNNYATYYADSVKGRFTISRDDSKNTLYLQMNSLRAEDTAVYYCVRHGNFGNSYVSWFAYWGQGTLVTVSSASTKGPSVFPLAPSSKSTSGGTAALGCLVKDYFPEPVTVSWNSGALTSGVHTFPAVLQSSGLYSLSSVVTVPSSSLGTKTYTCNVNHKPSNTKVDKKVERKSCDKTHTCPRCPAPELLGGPSVFLFPPKPKDTLMISRTPEVTCVVVDVSHEDPEVKFKWYVDGVEVHNAKTKPREEQYNSTYRVVSVLTVLHQDWLNGKEYKCKVSNKALPAPIEKTISKAKGQPREPQVYTLPPSREEMTKNQVSLTCLVKGFYPSDIAVEWESNGQPENNYKTIPPVLDSDGSFFLYSKLTVDKSRWQQGNVFSCSVMHEALHNHYTQKSLSLSPGK

SEQ ID NO: 138 - protein, 479 aa, Artificial Sequence
  Heavy Chain 1 of XENP11355 anti-CD19 x anti-CD3 dual scFv-Fc [HC ISO(-) (anti-CD19 scFv)J  (Figure 80)
EVQLVESGGGLVKPGGSLKLSCAASGYTFTSYVMHWVRQAPGKGLEWIGYINPYNDGTKYNEKFQGRVTISSDKSISTAYMELSSLRSEDTAMYYCARGTYYYGTRVFDYWGQGTLVTVSSGGGGSGGGGSGGGGSDIVMTQSPATLSLSPGERATLSCRSSKSLQNVNGNTYLYWFQQKPGQSPQLLIYRMSNLNSGVPDRFSGSGSGTEFTLTISSLEPEDFAVYYCMQHLEYPITFGAGTKLEIKEPKSSDKTHTCPPCPAPELLRGPSVFLFPPKPKDTLMISRTPEVTCVVVDVSHEDPEVQFNWYVDGVEVHNAKTKPREEQYNSTYRVVSVLTVLHQDWLNGKEYKCKVSNKARPAPIEKTISKAKGQPREPQVYTLPPSQEEMTKNQVSLTCLVKGFYPSDIAVEWESSGQPENNYNTTPPMLDSDGSFFLYSKLTVDKSRWQEGNVFSCSVMHEALHNHYTQKSLSLSPG

SEQ ID NO: 139 - protein, 481 aa, Artificial Sequence
  Heavy Chain 2 of XENP11355 anti-CD19 x anti-CD3 dual scFv-Fc [HC ISO(+RR) (anti-CD3 scFv)J  (Figure 80)
EVQLVESGGGLVQPGGSLRLSCAASGFTFNTYAMNWVRQAPGKGLEWVGRIRSKYNNYATYYADSVKGRFTISRDDSKNTLYLQMNSLRAEDTAVYYCVRHGNFGNSYVSWFAYWGQGTLVTVSSGGGGSGGGGSGGGGSQAVVTQEPSLTVSPGGTVTLTCGSSTGAVTTSNYANWVQQKPGQAPRGLIGGTNKRAPGVPARFSGSLLGGKAALTLSGAQPEDEAEYYCALWYSNLWVFGGGTKLTVLERKSSDKTHTCPRCPAPELLRGPSVFLFPPKPKDTLMISRTPEVTCVVVDVSHEDPEVKFKWYVDGVEVHNAKTKPREEQYNSTYRVVSVLTVLHQDWLNGKEYKCKVSNKARPAPIEKTISKAKGQPREPQVYTLPPSREEMTKNQVSLTCLVKGFYPSDIAVEWESNGQPENNYKTTPPVLDSDGSFFLYSKLTVDKSRWQQGNVFSCSVMHEALHNHYTQKSLSLSPGK

SEQ ID NO: 140 - protein, 476 aa, Artificial Sequence
  Heavy Chain 1 of XENP11139 anti-CD19 x anti-CD32b dual scFv-Fc [HC ISO(-) (anti-CD32b scFv)J  (Figure 82)
EVQLVESGGGLVSPGGSLKLSCVASGFAFSSYDMSWVRQTPEKRLEWVAKINSAGGRTNYPDTVKGRFTISRDNAENTLYLQMSSLKSEDTAMYYCAGHSYDYPFTYWGQGTLVTVSAGGGGSGGGGSGGGGSGGGGSDVVLTQSPATLSVTPGDSVSLSCRASQGISNNLHWYQQKSHESPRLLIKYASQSISGIPSRFSGSGSGTDFTLSINSVETEDFGMYFCQQSDSWPHTFGGGTKLEIKEPKSSDKTHTCPPCPAPELLRGPSVFLFPPKPKDTLMISRTPEVTCVVVDVSHEDPEVQFNWYVDGVEVHNAKTKPREEQYNSTYRVVSVLTVLHQDWLNGKEYKCKVSNKARPAPIEKTISKAKGQPREPQVYTLPPSQEEMTKNQVSLTCLVKGFYPSDIAVEWESSGQPENNYNTIPPMLDSDGSFFLYSKLTVDKSRWQEGNVFSCSVMHEALHNHYTQKSLSLSPG

SEQ ID NO: 141 - protein, 485 aa, Artificial Sequence
  Heavy Chain 2 of XENP11139 anti-CD19 x anti-CD32b dual scFv-Fc [HC ISO(+) (anti-CD19 scFv)J  (Figure 82)
EVQLVESGGGLVKPGGSLKLSCAASGYTFTSYVMHWVRQAPGKGLEWIGYINPYNDGTKYNEKFQGRVTISSDKSISTAYMELSSLRSEDTAMYYCARGTYYYGTRVFDYWGQGTLVTVSSGGGGSGGGGSGGGGSGGGGSDIVMTQSPATLSLSPGERATLSCRSSKSLQNVNGNTYLYWFQQKPGQSPQLLIYRMSNLNSGVPDRFSGSGSGTEFTLTISSLEPEDFAVYYCMQHLEYPITFGAGTKLEIKEPKSSDKTHTCPPCPAPELLRGPSVFLFPPKPKDTLMISRTPEVTCVVVDVSHEDPEVKFKWYVDGVEVHNAKTKPREEQYNSTYRVVSVLTVLHQDWLNGKEYKCKVSNKARPAPIEKTISKAKGQPREPQVYTLPPSREEMTKNQVSLTCLVKGFYPSDIAVEWESNGQPENNYKTIPPVLDSDGSFFLYSKLTVDKSRWQQGNVFSCSVMHEALHNHYTQKSLSLSPGK

SEQ ID NO: 142 - protein, 479 aa, Artificial Sequence; identical to SEQ ID NO: 138
  Heavy Chain 1 of XENP11338 anti-CD19 x anti-CD3 dual scFv-Fc [HC ISO(-) (anti-CD19 scFv)J  (Figure 84)

SEQ ID NO: 143 - protein, 442 aa, Artificial Sequence
  Heavy Chain 2 of XENP11338 anti-CD19 x anti-CD3 dual scFv-Fc [HC ISO(+) (anti-CD3 scFv)J  (Figure 84)
DIQLQQSGPGLVKPSQSLSLTCSVTGYSITTNYNWNWIRQFPGNKLEWMGYIRYDGTSEYTPSLKNRVSITRDTSMNQFFLRLTSVTPEDTATYYCARLDYWGQGTSVTVSSASTKGPSVFPLAPSSKSTSGGTAALGCLVKDYFPEPVTVSWNSGALTSGVHTFPAVLQSSGLYSLSSVVTVPSSSLGTKTYTCNVNHKPSNTKVDKKVEPKSCDKTHTCPPCPAPELLRGPSVFLFPPKPKDTLMISRTPEVTCVVVDVSHEDPEVKFKWYVDGVEVHNAKTKPREEQYNSTYRVVSVLTVLHQDWLNGKEYKCKVSNKARPAPIEKTISKAKGQPREPQVYTLPPSREEMTKNQVSLTCLVKGFYPSDIAVEWESNGQPENNYKTTPPVLDSDGSFFLYSKLTVDKSRWQQGNVFSCSVMHEALHNHYTQKSLSLSPGK

SEQ ID NO: 144 - protein, 445 aa, Artificial Sequence [sequence omitted]

SEQ ID NO: 145 - protein, 442 aa, Artificial Sequence; identical to SEQ ID NO: 143
  Heavy Chain 2 of XENP11233 anti-CD40 monovalent mAb [HC ISO(+) (anti-CD40 VH-CHl)]  (Figure 86)

SEQ ID NO: 146 - protein, 231 aa, Artificial Sequence
  Heavy Chain 1 of XENP11238 anti-CD40 one-arm mAb [HC ISO(-)] (Figure 88)
EPKSSDKTHTCPPCPAPELLRGPSVFLFPPKPKDTLMISRTPEVTCVVVDVSHEDPEVQFNWYVDGVEVHNAKTKPREEQYNSTYRVVSVLTVLHQDWLNGKEYKCKVSNKARPAPIEKTISKAKGQPREPQVYTLPPSQEEMTKNQVSLTCLVKGFYPSDIAVEWESSGQPENNYNTIPPMLDSDGSFFLYSKLTVDKSRWQEGNVFSCSVMHEALHNHYTQKSLSLSPG

SEQ ID NO: 147 - protein, 443 aa, Artificial Sequence
  Heavy Chain 2 of XENP11238 anti-CD40 one-arm mAb [HC ISO(+) (anti-CD40 Fa b)]  (Figure 88)
QVKLEESGPGLVAPSQSLSITCTVSGFSLSRYSVYWVRQPPGKGLEWLGMMWGGGSTDYNSALKSRLSISKDTSKSQVFLKMNSLQTDDTAMYYCVRTDGDYWGQGTSVTVSSASTKGPSVFPLAPSSKSTSGGTAALGCLVKDYFPEPVTVSWNSGALTSGVHTFPAVLQSSGLYSLSSVVTVPSSSLGTKTYTCNVNHKPSNTKVDKKVEPKSCDKTHTCPPCPAPELLRGPSVFLFPPKPKDTLMISRTPEVTCVVVDVSHEDPEVKFKWYVDGVEVHNAKTKPREEQYNSTYRVVSVLTVLHQDWLNGKEYKCKVSNKARPAPIEKTISKAKGQPREPQVYTLPPSREEMTKNQVSLTCLVKGFYPSDIAVEWESNGQPENNYKTIPPVLDSDGSFFLYSKLTVDKSRWQQGNVFSCSVMHEALHNHYTQKSLSLSPGK

SEQ ID NO: 148 - protein, 219 aa, Artificial Sequence; identical to SEQ ID NO: 48
  Light Chain of XENP11238 anti-CD40 one-arm mAb [LC (anti-CD40 Fa b)]  (Figure 88)

SEQ ID NO: 149 - protein, 330 aa, Artificial Sequence
  IgG1-WT  (Figure 92A)
ASTKGPSVFPLAPSSKSTSGGTAALGCLVKDYFPEPVTVSWNSGALTSGVHTFPAVLQSSGLYSLSSVVTVPSSSLGTQTYICNVNHKPSNTKVDKKVEPKSCDKTHTCPPCPAPELLGGPSVFLFPPKPKDTLMISRTPEVTCVVVDVSHEDPEVKFNWYVDGVEVHNAKTKPREEQYNSTYRVVSVLTVLHQDWLNGKEYKCKVSNKALPAPIEKTISKAKGQPREPQVYTLPPSREEMTKNQVSLTCLVKGFYPSDIAVEWESNGQPENNYKTTPPVLDSDGSFFLYSKLTVDKSRWQQGNVFSCSVMHEALHNHYTQKSLSLSPGK

SEQ ID NO: 150 - protein, 326 aa, Artificial Sequence
  IgG2-WT  (Figure 92A)
ASTKGPSVFPLAPCSRSTSESTAALGCLVKDYFPEPVTVSWNSGALTSGVHTFPAVLQSSGLYSLSSVVTVPSSNFGTQTYTCNVDHKPSNTKVDKTVERKCCVECPPCPAPPVAGPSVFLFPPKPKDTLMISRTPEVTCVVVDVSHEDPEVQFNWYVDGVEVHNAKTKPREEQFNSTFRVVSVLTVVHQDWLNGKEYKCKVSNKGLPAPIEKTISKTKGQPREPQVYTLPPSREEMTKNQVSLTCLVKGFYPSDIAVEWESNGQPENNYKTTPPMLDSDGSFFLYSKLTVDKSRWQQGNVFSCSVMHEALHNHYTQKSLSLSPGK

SEQ ID NO: 151 - protein, 332 aa, Artificial Sequence
  IgG3-WT  (Figure 92A)
ASTKGPSVFPLAPCSRSTSGGTAALGCLVKDYFPEPVTVSWNSGALTSGVHTFPAVLQSSGLYSLSSVVTVPSSSLGTQTYTCNVNHKPSNTKVDKRVELKTPLGDTTHTCPRCPAPELLGGPSVFLFPPKPKDTLMISRTPEVTCVVVDVSHEDPEVQFKWYVDGVEVHNAKTKPREEQYNSTFRVVSVLTVLHQDWLNGKEYKCKVSNKALPAPIEKTISKTKGQPREPQVYTLPPSREEMTKNQVSLTCLVKGFYPSDIAVEWESSGQPENNYNTTPPMLDSDGSFFLYSKLTVDKSRWQQGNIFSCSVMHEALHNRFTQKSLSLSPGK

SEQ ID NO: 152 - protein, 327 aa, Artificial Sequence
  IgG4-WT  (Figure 92A)
ASTKGPSVFPLAPCSRSTSESTAALGCLVKDYFPEPVTVSWNSGALTSGVHTFPAVLQSSGLYSLSSVVTVPSSSLGTKTYTCNVDHKPSNTKVDKRVESKYGPPCPSCPAPEFLGGPSVFLFPPKPKDTLMISRTPEVTCVVVDVSQEDPEVQFNWYVDGVEVHNAKTKPREEQFNSTYRVVSVLTVLHQDWLNGKEYKCKVSNKGLPSSIEKTISKAKGQPREPQVYTLPPSQEEMTKNQVSLTCLVKGFYPSDIAVEWESNGQPENNYKTTPPVLDSDGSFFLYSRLTVDKSRWQEGNVFSCSVMHEALHNHYTQKSLSLSLGK

SEQ ID NO: 153 - protein, 329 aa, Artificial Sequence
  IgG1/2-HC  (Figure 92A)
ASTKGPSVFPLAPSSKSTSGGTAALGCLVKDYFPEPVTVSWNSGALTSGVHTFPAVLQSSGLYSLSSVVTVPSSSLGTQTYICNVNHKPSNTKVDKKVEPKSCDKTHTCPPCPAPPVAGPSVFLFPPKPKDTLMISRTPEVTCVVVDVSHEDPEVQFNWYVDGVEVHNAKTKPREEQFNSTFRVVSVLTVVHQDWLNGKEYKCKVSNKGLPAPIEKTISKTKGQPREPQVYTLPPSREEMTKNQVSLTCLVKGFYPSDIAVEWESNGQPENNYKTTPPMLDSDGSFFLYSKLTVDKSRWQQGNVFSCSVMHEALHNHYTQKSLSLSPGK

SEQ ID NO: 154 - protein, 330 aa, Artificial Sequence
  IgG1-434S  (Figure 92B)
ASTKGPSVFPLAPSSKSTSGGTAALGCLVKDYFPEPVTVSWNSGALTSGVHTFPAVLQSSGLYSLSSVVTVPSSSLGTQTYICNVNHKPSNTKVDKKVEPKSCDKTHTCPPCPAPELLGGPSVFLFPPKPKDTLMISRTPEVTCVVVDVSHEDPEVKFNWYVDGVEVHNAKTKPREEQYNSTYRVVSVLTVLHQDWLNGKEYKCKVSNKALPAPIEKTISKAKGQPREPQVYTLPPSREEMTKNQVSLTCLVKGFYPSDIAVEWESNGQPENNYKTTPPVLDSDGSFFLYSKLTVDKSRWQQGNVFSCSVMHEALHSHYTQKSLSLSPGK

SEQ ID NO: 155 - protein, 326 aa, Artificial Sequence
  IgG2-434S  (Figure 92B)
ASTKGPSVFPLAPCSRSTSESTAALGCLVKDYFPEPVTVSWNSGALTSGVHTFPAVLQSSGLYSLSSVVTVPSSNFGTQTYTCNVDHKPSNTKVDKTVERKCCVECPPCPAPPVAGPSVFLFPPKPKDTLMISRTPEVTCVVVDVSHEDPEVQFNWYVDGVEVHNAKTKPREEQFNSTFRVVSVLTVVHQDWLNGKEYKCKVSNKGLPAPIEKTISKTKGQPREPQVYTLPPSREEMTKNQVSLTCLVKGFYPSDIAVEWESNGQPENNYKTTPPMLDSDGSFFLYSKLTVDKSRWQQGNVFSCSVMHEALHSHYTQKSLSLSPGK

SEQ ID NO: 156 - protein, 330 aa, Artificial Sequence
  IgG1-CH1-pI(6)  (Figure 92B)
AETKGPSVFPLAPSSESTSGGTAALGCLVKDYFPEPVTVSWNSGALESGVHTFPAVLQSSGLYSLSSVVTVPSSSLGTQTYICNVNHEPSDTEVDKKVEPKSCDKTHTCPPCPAPELLGGPSVFLFPPKPKDTLMISRTPEVTCVVVDVSHEDPEVKFNWYVDGVEVHNAKTKPREEQYNSTYRVVSVLTVLHQDWLNGKEYKCKVSNKALPAPIEKTISKAKGQPREPQVYTLPPSREEMTKNQVSLTCLVKGFYPSDIAVEWESNGQPENNYKTTPPVLDSDGSFFLYSKLTVDKSRWQQGNVFSCSVMHEALHNHYTQKSLSLSPGK

SEQ ID NO: 157 - protein, 330 aa, Artificial Sequence; identical to SEQ ID NO: 149
  IgG1-WT  (Figure 92B)

SEQ ID NO: 158 - protein, 330 aa, Artificial Sequence; identical to SEQ ID NO: 156
  IgG1-CH1-pI(6)  (Figure 92B)

SEQ ID NO: 159 - protein, 330 aa, Artificial Sequence
  IgG1-CH1-pI(6)-434S  (Figure 92B)
AETKGPSVFPLAPSSESTSGGTAALGCLVKDYFPEPVTVSWNSGALESGVHTFPAVLQSSGLYSLSSVVTVPSSSLGTQTYICNVNHEPSDTEVDKKVEPKSCDKTHTCPPCPAPELLGGPSVFLFPPKPKDTLMISRTPEVTCVVVDVSHEDPEVKFNWYVDGVEVHNAKTKPREEQYNSTYRVVSVLTVLHQDWLNGKEYKCKVSNKALPAPIEKTISKAKGQPREPQVYTLPPSREEMTKNQVSLTCLVKGFYPSDIAVEWESNGQPENNYKTTPPVLDSDGSFFLYSKLTVDKSRWQQGNVFSCSVMHEALHSHYTQKSLSLSPGK

SEQ ID NO: 160 - protein, 330 aa, Artificial Sequence
  IgG1-CH1-pI(6)-428L/434S  (Figure 92C)
AETKGPSVFPLAPSSESTSGGTAALGCLVKDYFPEPVTVSWNSGALESGVHTFPAVLQSSGLYSLSSVVTVPSSSLGTQTYICNVNHEPSDTEVDKKVEPKSCDKTHTCPPCPAPELLGGPSVFLFPPKPKDTLMISRTPEVTCVVVDVSHEDPEVKFNWYVDGVEVHNAKTKPREEQYNSTYRVVSVLTVLHQDWLNGKEYKCKVSNKALPAPIEKTISKAKGQPREPQVYTLPPSREEMTKNQVSLTCLVKGFYPSDIAVEWESNGQPENNYKTTPPVLDSDGSFFLYSKLTVDKSRWQQGNVFSCSVLHEALHSHYTQKSLSLSPGK

SEQ ID NO: 161 - protein, 330 aa, Artificial Sequence; identical to SEQ ID NO: 149
  IgG1-WT  (Figure 92C)

SEQ ID NO: 162 - protein, 330 aa, Artificial Sequence; identical to SEQ ID NO: 149
  IgG1-WT  (Figure 92C)

SEQ ID NO: 163 - protein, 326 aa, Artificial Sequence; identical to SEQ ID NO: 150
  IgG2-WT  (Figure 92C)

SEQ ID NO: 164 - protein, 326 aa, Artificial Sequence; identical to SEQ ID NO: 150
  IgG2-WT  (Figure 92C)

SEQ ID NO: 165 - protein, 326 aa, Artificial Sequence; identical to SEQ ID NO: 150
  IgG2-WT  (Figure 92C)

SEQ ID NO: 166 - protein, 329 aa, Artificial Sequence
  pI-Iso1  (Figure 92D)
ASTKGPSVFPLAPSSKSTSESTAALGCLVKDYFPEPVTVSWNSGALTSGVHTFPAVLQSSGLYSLSSVVTVPSSSLGTQTYTCNVDHKPSNTKVDKTVEPKSCDTTHTCPPCPAPELLGGPSVFLFPPKPKDTLMISRTPEVTCVVVDVSHEDPEVQFNWYVDGVEVHNAKTKPREEQYNSTYRVVSVLTVLHQDWLNGKEYKCKVSNKALPAPIEKTISKAKGQPREPQVYTLPPSQEEMTKNQVSLTCLVKGFYPSDIAVEWESSGQPENNYNTTPPMLDSDGSFFLYSKLTVDKSRWQEGNVFSCSVMHEALHNHYTQKSLSLSPG

SEQ ID NO: 167 - protein, 329 aa, Artificial Sequence
  pI-Iso1(NF)  (Figure 92D)
ASTKGPSVFPLAPSSKSTSESTAALGCLVKDYFPEPVTVSWNSGALTSGVHTFPAVLQSSGLYSLSSVVTVPSSNFGTQTYTCNVDHKPSNTKVDKTVEPKSCDTTHTCPPCPAPELLGGPSVFLFPPKPKDTLMISRTPEVTCVVVDVSHEDPEVQFNWYVDGVEVHNAKTKPREEQYNSTYRVVSVLTVLHQDWLNGKEYKCKVSNKALPAPIEKTISKAKGQPREPQVYTLPPSQEEMTKNQVSLTCLVKGFYPSDIAVEWESSGQPENNYNTTPPMLDSDGSFFLYSKLTVDKSRWQEGNVFSCSVMHEALHNHYTQKSLSLSPG

SEQ ID NO: 168 - protein, 326 aa, Artificial Sequence
  pI-Iso1(NF-VE)  (Figure 92D)
ASTKGPSVFPLAPSSKSTSESTAALGCLVKDYFPEPVTVSWNSGALTSGVHTFPAVLQSSGLYSLSSVVTVPSSNFGTQTYTCNVDHKPSNTKVDKTVEPKSCVECPPCPAPELLGGPSVFLFPPKPKDTLMISRTPEVTCVVVDVSHEDPEVQFNWYVDGVEVHNAKTKPREEQYNSTYRVVSVLTVLHQDWLNGKEYKCKVSNKALPAPIEKTISKAKGQPREPQVYTLPPSQEEMTKNQVSLTCLVKGFYPSDIAVEWESSGQPENNYNTTPPMLDSDGSFFLYSKLTVDKSRWQEGNVFSCSVMHEALHNHYTQKSLSLSPG

SEQ ID NO: 169 - protein, 326 aa, Artificial Sequence; identical to SEQ ID NO: 168
  pI-Iso1(NF-VE)   (Figure 92D)

SEQ ID NO: 170 - protein, 326 aa, Artificial Sequence; identical to SEQ ID NO: 168
  pI-Iso1(NF-VE)   (Figure 92D)

SEQ ID NO: 171 - protein, 326 aa, Artificial Sequence; identical to SEQ ID NO: 168
  pI-Iso1(NF-VE)   (Figure 92D)

SEQ ID NO: 172 - protein, 330 aa, Artificial Sequence
  pI-Iso1(NF-VE-DEDE)   (Figure 92E)
ASTKGPSVFPLAPSSKSTSESTAALGCLVKDYFPEPVTVSWNSGALTSGVHTFPAVLQSSGLYSLSSVVTVPSSNFGTQTYTCNVDHKPSNTKVDKTVEPKSCVECPPCPAPELLGGPSVFLFPPKPKDTLMISRTPEVTCVVVDVSHEDPEVQFNWYVDGVEVHNAKTKPREEQYNSTYRVVSVLTVLHQDWLNGKEYKCKVSNKALPAPIEKTISKAKGQPREPQVYTLPPSQEEMTKNQVSLTCLVKGFYPSDIAVEWESSGQPENNYNTTPPMLDSDGSFFLYSKLTVDKSRWQEGNVFSCSVMHEALHNHYTQKSLSLSPGDEDE

SEQ ID NO: 173 - protein, 330 aa, Artificial Sequence; identical to SEQ ID NO: 172
  pI-Iso1(NF-VE-DEDE)   (Figure 92E)

SEQ ID NO: 174 - protein, 330 aa, Artificial Sequence; identical to SEQ ID NO: 172
  XENP010105  pI-Iso1(NF-VE-DEDE)   (Figure 92E)

SEQ ID NO: 175 - protein, 330 aa, Artificial Sequence; identical to SEQ ID NO: 172
  pI-Iso1(NF-VE-DEDE)   (Figure 92E)

SEQ ID NO: 176 - protein, 329 aa, Artificial Sequence
  IgG1-pI(7)   (Figure 92E)
ASTKGPSVFPLAPSSESTSGGTAALGCLVKDYFPEPVTVSWNSGALTSGVHTFPAVLQSSGLYSLSSVVTVPSSSLGTQTYICNVNHEPSNTEVDKKVEPKSCDKTHTCPPCPAPELLGGPSVFLFPPKPKDTLMISRTPEVTCVVVDVSHEDPEVEFNWYVDGVEVHNAKTKPREEQYNSTYRVVSVLTVLHQDWLNGKEYKCKVSNKALPAPIEKTISKAKGQPREPQVYTLPPSEEEMTKNQVSLTCLVKGFYPSDIAVEWESNGQPENNYETTPPVLDSDGSFFLYSKLTVDKSRWQQGNVFSCSVMHEALHNHYTQKSLSLSPG

SEQ ID NO: 177 - protein, 329 aa, Artificial Sequence
  IgG1-pI(11)   (Figure 92E)
ASTKGPSVFPLAPSSESTSGGTAALGCLVKDYFPEPVTVSWNSGALTSGVHTFPAVLQSSGLYSLSSVVTVPSSSLGTQTYICNVNHEPSNTEVDKKVEPKSCDKTHTCPPCPAPELLGGPSVFLFPPKPKDTLMISRTPEVTCVVVDVSHEDPEVEFNWYVDGVEVHNAKTKPREEQYNSTYRVVSVLTVLHQDWLNGKEYECEVSNEALPAPIEETISKAKGQPREPQVYTLPPSEEEMTKNQVSLTCLVKGFYPSDIAVEWESNGQPENNYETTPPVLDSDGSFFLYSKLTVDKSRWQQGNVFSCSVMHEALHNHYTQKSLSLSPG

SEQ ID NO: 178 - protein, 328 aa, Artificial Sequence
  IgG1/2-pI(7)   (Figure 92F)
ASTKGPSVFPLAPSSESTSGGTAALGCLVKDYFPEPVTVSWNSGALTSGVHTFPAVLQSSGLYSLSSVVTVPSSSLGTQTYICNVNHEPSNTEVDKKVEPKSCDKTHTCPPCPAPPVAGPSVFLFPPKPKDTLMISRTPEVTCVVVDVSHEDPEVEFNWYVDGVEVHNAKTKPREEQFNSTFRVVSVLTVVHQDWLNGKEYKCKVSNKGLPAPIEKTISKTKGQPREPQVYTLPPSEEEMTKNQVSLTCLVKGFYPSDIAVEWESNGQPENNYETTPPMLDSDGSFFLYSKLTVDKSRWQQGNVFSCSVMHEALHNHYTQKSLSLSPG

SEQ ID NO: 179 - protein, 328 aa, Artificial Sequence
  IgG1/2-pI(11)  (Figure 92F)
ASTKGPSVFPLAPSSESTSGGTAALGCLVKDYFPEPVTVSWNSGALTSGVHTFPAVLQSSGLYSLSSVVTVPSSSLGTQTYICNVNHEPSNTEVDKKVEPKSCDKTHTCPPCPAPPVAGPSVFLFPPKPKDTLMISRTPEVTCVVVDVSHEDPEVEFNWYVDGVEVHNAKTKPREEQFNSTFRVVSVLTVVHQDWLNGKEYECEVSNEGLPAPIEETISKTKGQPREPQVYTLPPSEEEMTKNQVSLTCLVKGFYPSDIAVEWESNGQPENNYETTPPMLDSDGSFFLYSKLTVDKSRWQQGNVFSCSVMHEALHNHYTQKSLSLSPG

SEQ ID NO: 180 - protein, 330 aa, Artificial Sequence
  IgG1-pI(6)-Neutral-to-DE  (Figure 92F)
AETKGPSVFPLAPSSKSTSGGTAALGCLVKDYFPEPVTVSWNSGALESGVHTFPAVLQSSGLYSLSSVVTVPSSSLGTQTYICNVNHKPSDTKVDKKVEPKSCDKTHTCPPCPAPELLGGPSVFLFPPKPKDTLMISRTPEVTCVVVDVSHEDPEVKFNWYVDGVEVHNAKTKPREEQYNSTYRVVSVLTVLHQDWLNGKEYKCKVSNKALPAPIEKTISKAKGQPREPQVYTLPPSREEMTKNQVSLTCLVKGFYPSDIAVEWESNGQPENNYKTTPPVLDSDGSFFLYSKLTVDKSRWQQGNVFSCSVMHEALHNHYTQKSLSLSPGK

SEQ ID NO: 181 - protein, 330 aa, Artificial Sequence
  IgG1-pI(6)-KR-to-Neutral  (Figure 92F)
ASTKGPSVFPLAPSSQSTSGGTAALGCLVKDYFPEPVTVSWNSGALTSGVHTFPAVLQSSGLYSLSSVVTVPSSSLGTQTYICNVNHQPSNTQVDKKVEPKSCDKTHTCPPCPAPELLGGPSVFLFPPKPKDTLMISRTPEVTCVVVDVSHEDPEVKFNWYVDGVEVHNAKTKPREEQYNSTYRVVSVLTVLHQDWLNGKEYKCKVSNKALPAPIEKTISKAKGQPREPQVYTLPPSREEMTKNQVSLTCLVKGFYPSDIAVEWESNGQPENNYKTTPPVLDSDGSFFLYSKLTVDKSRWQQGNVFSCSVMHEALHNHYTQKSLSLSPGK

SEQ ID NO: 182 - protein, 330 aa, Artificial Sequence
  IgG1-pI(6)-KR-to-DE  (Figure 92F)
ASTKGPSVFPLAPSSESTSGGTAALGCLVKDYFPEPVTVSWNSGALTSGVHTFPAVLQSSGLYSLSSVVTVPSSSLGTQTYICNVNHEPSNTEVDKKVEPKSCDKTHTCPPCPAPELLGGPSVFLFPPKPKDTLMISRTPEVTCVVVDVSHEDPEVKFNWYVDGVEVHNAKTKPREEQYNSTYRVVSVLTVLHQDWLNGKEYKCKVSNKALPAPIEKTISKAKGQPREPQVYTLPPSREEMTKNQVSLTCLVKGFYPSDIAVEWESNGQPENNYKTTPPVLDSDGSFFLYSKLTVDKSRWQQGNVFSCSVMHEALHNHYTQKSLSLSPGK

SEQ ID NO: 183 - protein, 325 aa, Artificial Sequence; identical to SEQ ID NO: 19
  IgG-pI-Iso2  (Figure 92F)

SEQ ID NO: 184 - protein, 329 aa, Artificial Sequence
  IgG-pI-Iso3  (Figure 92G)
ASTKGPSVFPLAPSSKSTSESTAALGCLVKDYFPEPVTVSWNSGALTSGVHTFPAVLQSSGLYSLSSVVTVPSSNFGTQTYTCNVDHKPSNTKVDKTVEPKSCDTTHTCPPCPAPELLGGPSVFLFPPKPKDTLMISRTPEVTCVVVDVSHEDPEVQFNWYVDGVEVHNAKTKPREEQFNSTFRVVSVLTVVHQDWLNGKEYKCKVSNKALPAPIEKTISKTKGQPREPQVYTLPPSQEEMTKNQVSLTCLVKGFYPSDIAVEWESSGQPENNYNTTPPMLDSDGSFFLYSKLTVDKSRWQEGNVFSCSVMHEALHNHYTQKSLSLSPG

SEQ ID NO: 185 - protein, 325 aa, Artificial Sequence
  IgG-pI-Iso2-434S  (Figure 92G)
ASTKGPSVFPLAPSSKSTSESTAALGCLVKDYFPEPVTVSWNSGALTSGVHTFPAVLQSSGLYSLSSVVTVPSSNFGTQTYTCNVDHKPSNTKVDKTVEPKSCVECPPCPAPPVAGPSVFLFPPKPKDTLMISRTPEVTCVVVDVSHEDPEVQFNWYVDGVEVHNAKTKPREEQFNSTFRVVSVLTVVHQDWLNGKEYKCKVSNKGLPAPIEKTISKTKGQPREPQVYTLPPSQEEMTKNQVSLTCLVKGFYPSDIAVEWESSGQPENNYNTTPPMLDSDGSFFLYSKLTVDKSRWQEGNVFSCSVMHEALHSHYTQKSLSLSPG

SEQ ID NO: 186 - protein, 329 aa, Artificial Sequence
  IgG-pI-Iso3-434S  (Figure 92G)
ASTKGPSVFPLAPSSKSTSESTAALGCLVKDYFPEPVTVSWNSGALTSGVHTFPAVLQSSGLYSLSSVVTVPSSNFGTQTYTCNVDHKPSNTKVDKTVEPKSCDTTHTCPPCPAPELLGGPSVFLFPPKPKDTLMISRTPEVTCVVVDVSHEDPEVQFNWYVDGVEVHNAKTKPREEQFNSTFRVVSVLTVVHQDWLNGKEYKCKVSNKALPAPIEKTISKTKGQPREPQVYTLPPSQEEMTKNQVSLTCLVKGFYPSDIAVEWESSGQPENNYNTTPPMLDSDGSFFLYSKLTVDKSRWQEGNVFSCSVMHEALHSHYTQKSLSLSPG

SEQ ID NO: 187 - protein, 325 aa, Artificial Sequence; identical to SEQ ID NO: 19
  IgG-pI-Iso2  (Figure 92G)

SEQ ID NO: 188 - protein, 329 aa, Artificial Sequence; identical to SEQ ID NO: 184
  IgG-pI-Iso3  (Figure 92G)

SEQ ID NO: 189 - protein, 325 aa, Artificial Sequence; identical to SEQ ID NO: 185
  IgG-pI-Iso2-434S  (Figure 92G)

SEQ ID NO: 190 - protein, 329 aa, Artificial Sequence; identical to SEQ ID NO: 186
  IgG-pI-Iso3-434S  (Figure 92H)

SEQ ID NO: 191 - protein, 329 aa, Artificial Sequence
  IgG-pI-Iso3-434S (B)  (Figure 92H)
ASTKGPSVFPLAPSSKSTSESTAALGCLVKDYFPEPVTVSWNSGALTSGVHTFPAVLQSSGLYSLSSVVTVPSSNFGTQTYTCNVDHKPSNTKVDKTVEPKSCDKTHTCPPCPAPELLGGPSVFLFPPKPKDTLMISRTPEVTCVVVDVSHEDPEVQFNWYVDGVEVHNAKTKPREEQFNSTFRVVSVLTVVHQDWLNGKEYKCKVSNKALPAPIEKTISKTKGQPREPQVYTLPPSQEEMTKNQVSLTCLVKGFYPSDIAVEWESSGQPENNYNTTPPMLDSDGSFFLYSKLTVDKSRWQEGNVFSCSVMHEALHNHYTQKSLSLSPG

SEQ ID NO: 192 - protein, 329 aa, Artificial Sequence
  IgG-pI-Iso3-434S (C)  (Figure 92H)
ASTKGPSVFPLAPSSKSTSESTAALGCLVKDYFPEPVTVSWNSGALTSGVHTFPAVLQSSGLYSLSSVVTVPSSNFGTQTYTCNVDHKPSNTKVDKTVEPKSCDTTHTCPPCPAPELLGGPSVFLFPPKPKDTLMISRTPEVTCVVVDVSHEDPEVKFNWYVDGVEVHNAKTKPREEQFNSTFRVVSVLTVVHQDWLNGKEYKCKVSNKALPAPIEKTISKTKGQPREPQVYTLPPSQEEMTKNQVSLTCLVKGFYPSDIAVEWESSGQPENNYNTTPPMLDSDGSFFLYSKLTVDKSRWQEGNVFSCSVMHEALHNHYTQKSLSLSPG

SEQ ID NO: 193 - protein, 329 aa, Artificial Sequence
  IgG-pI-Iso3-434S (D)  (Figure 92H)
ASTKGPSVFPLAPSSKSTSESTAALGCLVKDYFPEPVTVSWNSGALTSGVHTFPAVLQSSGLYSLSSVVTVPSSNFGTQTYTCNVDHKPSNTKVDKTVEPKSCDTTHTCPPCPAPELLGGPSVFLFPPKPKDTLMISRTPEVTCVVVDVSHEDPEVQFNWYVDGVEVHNAKTKPREEQYNSTFRVVSVLTVVHQDWLNGKEYKCKVSNKALPAPIEKTISKTKGQPREPQVYTLPPSQEEMTKNQVSLTCLVKGFYPSDIAVEWESSGQPENNYNTTPPMLDSDGSFFLYSKLTVDKSRWQEGNVFSCSVMHEALHNHYTQKSLSLSPG

SEQ ID NO: 194 - protein, 329 aa, Artificial Sequence
  IgG-pI-Iso3-434S (E)  (Figure 92H)
ASTKGPSVFPLAPSSKSTSESTAALGCLVKDYFPEPVTVSWNSGALTSGVHTFPAVLQSSGLYSLSSVVTVPSSNFGTQTYTCNVDHKPSNTKVDKTVEPKSCDTTHTCPPCPAPELLGGPSVFLFPPKPKDTLMISRTPEVTCVVVDVSHEDPEVQFNWYVDGVEVHNAKTKPREEQFNSTYRVVSVLTVVHQDWLNGKEYKCKVSNKALPAPIEKTISKTKGQPREPQVYTLPPSQEEMTKNQVSLTCLVKGFYPSDIAVEWESSGQPENNYNTTPPMLDSDGSFFLYSKLTVDKSRWQEGNVFSCSVMHEALHNHYTQKSLSLSPG

SEQ ID NO: 195 - protein, 329 aa, Artificial Sequence
  IgG-pI-Iso3-434S (F)  (Figure 92H)
ASTKGPSVFPLAPSSKSTSESTAALGCLVKDYFPEPVTVSWNSGALTSGVHTFPAVLQSSGLYSLSSVVTVPSSNFGTQTYTCNVDHKPSNTKVDKTVEPKSCDTTHTCPPCPAPELLGGPSVFLFPPKPKDTLMISRTPEVTCVVVDVSHEDPEVQFNWYVDGVEVHNAKTKPREEQFNSTFRVVSVLTVLHQDWLNGKEYKCKVSNKALPAPIEKTISKTKGQPREPQVYTLPPSQEEMTKNQVSLTCLVKGFYPSDIAVEWESSGQPENNYNTTPPMLDSDGSFFLYSKLTVDKSRWQEGNVFSCSVMHEALHNHYTQKSLSLSPG

SEQ ID NO: 196 - protein, 329 aa, Artificial Sequence
  IgG-pI-Iso3-434S (G)  (Figure 92I)
ASTKGPSVFPLAPSSKSTSESTAALGCLVKDYFPEPVTVSWNSGALTSGVHTFPAVLQSSGLYSLSSVVTVPSSNFGTQTYTCNVDHKPSNTKVDKTVEPKSCDTTHTCPPCPAPELLGGPSVFLFPPKPKDTLMISRTPEVTCVVVDVSHEDPEVQFNWYVDGVEVHNAKTKPREEQFNSTFRVVSVLTVVHQDWLNGKEYKCKVSNKALPAPIEKTISKAKGQPREPQVYTLPPSQEEMTKNQVSLTCLVKGFYPSDIAVEWESSGQPENNYNTTPPMLDSDGSFFLYSKLTVDKSRWQEGNVFSCSVMHEALHNHYTQKSLSLSPG

SEQ ID NO: 197 - protein, 329 aa, Artificial Sequence
  IgG-pI-Iso3-434S (H)  (Figure 92I)
ASTKGPSVFPLAPSSKSTSESTAALGCLVKDYFPEPVTVSWNSGALTSGVHTFPAVLQSSGLYSLSSVVTVPSSNFGTQTYTCNVDHKPSNTKVDKTVEPKSCDTTHTCPPCPAPELLGGPSVFLFPPKPKDTLMISRTPEVTCVVVDVSHEDPEVQFNWYVDGVEVHNAKTKPREEQFNSTFRVVSVLTVVHQDWLNGKEYKCKVSNKALPAPIEKTISKTKGQPREPQVYTLPPSREEMTKNQVSLTCLVKGFYPSDIAVEWESSGQPENNYNTTPPMLDSDGSFFLYSKLTVDKSRWQEGNVFSCSVMHEALHNHYTQKSLSLSPG

SEQ ID NO: 198 - protein, 329 aa, Artificial Sequence
  IgG-pI-Iso3-434S (I)  (Figure 92I)
ASTKGPSVFPLAPSSKSTSESTAALGCLVKDYFPEPVTVSWNSGALTSGVHTFPAVLQSSGLYSLSSVVTVPSSNFGTQTYTCNVDHKPSNTKVDKTVEPKSCDTTHTCPPCPAPELLGGPSVFLFPPKPKDTLMISRTPEVTCVVVDVSHEDPEVQFNWYVDGVEVHNAKTKPREEQFNSTFRVVSVLTVVHQDWLNGKEYKCKVSNKALPAPIEKTISKTKGQPREPQVYTLPPSQEEMTKNQVSLTCLVKGFYPSDIAVEWESNGQPENNYNTTPPMLDSDGSFFLYSKLTVDKSRWQEGNVFSCSVMHEALHNHYTQKSLSLSPG

SEQ ID NO: 199 - protein, 329 aa, Artificial Sequence
  IgG-pI-Iso3-434S (J)  (Figure 92I)
ASTKGPSVFPLAPSSKSTSESTAALGCLVKDYFPEPVTVSWNSGALTSGVHTFPAVLQSSGLYSLSSVVTVPSSNFGTQTYTCNVDHKPSNTKVDKTVEPKSCDTTHTCPPCPAPELLGGPSVFLFPPKPKDTLMISRTPEVTCVVVDVSHEDPEVQFNWYVDGVEVHNAKTKPREEQFNSTFRVVSVLTVVHQDWLNGKEYKCKVSNKALPAPIEKTISKTKGQPREPQVYTLPPSQEEMTKNQVSLTCLVKGFYPSDIAVEWESSGQPENNYKTTPPMLDSDGSFFLYSKLTVDKSRWQEGNVFSCSVMHEALHNHYTQKSLSLSPG

SEQ ID NO: 200 - protein, 329 aa, Artificial Sequence
  IgG-pI-Iso3-434S (K)  (Figure 92I)
ASTKGPSVFPLAPSSKSTSESTAALGCLVKDYFPEPVTVSWNSGALTSGVHTFPAVLQSSGLYSLSSVVTVPSSNFGTQTYTCNVDHKPSNTKVDKTVEPKSCDTTHTCPPCPAPELLGGPSVFLFPPKPKDTLMISRTPEVTCVVVDVSHEDPEVQFNWYVDGVEVHNAKTKPREEQFNSTFRVVSVLTVVHQDWLNGKEYKCKVSNKALPAPIEKTISKTKGQPREPQVYTLPPSQEEMTKNQVSLTCLVKGFYPSDIAVEWESSGQPENNYNTTPPVLDSDGSFFLYSKLTVDKSRWQEGNVFSCSVMHEALHNHYTQKSLSLSPG

SEQ ID NO: 201 - protein, 329 aa, Artificial Sequence
  IgG-pI-Iso3-434S (L)  (Figure 92I)
ASTKGPSVFPLAPSSKSTSESTAALGCLVKDYFPEPVTVSWNSGALTSGVHTFPAVLQSSGLYSLSSVVTVPSSNFGTQTYTCNVDHKPSNTKVDKTVEPKSCDTTHTCPPCPAPELLGGPSVFLFPPKPKDTLMISRTPEVTCVVVDVSHEDPEVQFNWYVDGVEVHNAKTKPREEQFNSTFRVVSVLTVVHQDWLNGKEYKCKVSNKALPAPIEKTISKTKGQPREPQVYTLPPSQEEMTKNQVSLTCLVKGFYPSDIAVEWESSGQPENNYNTTPPMLDSDGSFFLYSKLTVDKSRWQQGNVFSCSVMHEALHNHYTQKSLSLSPG

SEQ ID NO: 202 - protein, 329 aa, Artificial Sequence
  IgG-pI-Iso3-434S (M)  (Figure 92J)
ASTKGPSVFPLAPSSKSTSESTAALGCLVKDYFPEPVTVSWNSGALTSGVHTFPAVLQSSGLYSLSSVVTVPSSNFGTQTYTCNVDHKPSNTKVDKTVEPKSCDTTHTCPPCPAPELLGGPSVFLFPPKPKDTLMISRTPEVTCVVVDVSHEDPEVQFNWYVDGVEVHNAKTKPREEQYNSTYRVVSVLTVVHQDWLNGKEYKCKVSNKALPAPIEKTISKTKGQPREPQVYTLPPSQEEMTKNQVSLTCLVKGFYPSDIAVEWESSGQPENNYNTTPPMLDSDGSFFLYSKLTVDKSRWQEGNVFSCSVMHEALHNHYTQKSLSLSPG

SEQ ID NO: 203 - protein, 329 aa, Artificial Sequence
  IgG-pI-Iso3-434S (N)  (Figure 92J)
ASTKGPSVFPLAPSSKSTSESTAALGCLVKDYFPEPVTVSWNSGALTSGVHTFPAVLQSSGLYSLSSVVTVPSSNFGTQTYTCNVDHKPSNTKVDKTVEPKSCDTTHTCPPCPAPELLGGPSVFLFPPKPKDTLMISRTPEVTCVVVDVSHEDPEVQFNWYVDGVEVHNAKTKPREEQFNSTFRVVSVLTVVHQDWLNGKEYKCKVSNKALPAPIEKTISKTKGQPREPQVYTLPPSQEEMTKNQVSLTCLVKGFYPSDIAVEWESNGQPENNYKTTPPVLDSDGSFFLYSKLTVDKSRWQEGNVFSCSVMHEALHNHYTQKSLSLSPG

SEQ ID NO: 204 - protein, 329 aa, Artificial Sequence
  IgG-pI-Iso3-434S (O)  (Figure 92J)
ASTKGPSVFPLAPSSKSTSGSTAALGCLVKDYFPEPVTVSWNSGALTSGVHTFPAVLQSSGLYSLSSVVTVPSSNFGTQTYTCNVDHKPSNTKVDKTVEPKSCDTTHTCPPCPAPELLGGPSVFLFPPKPKDTLMISRTPEVTCVVVDVSHEDPEVQFNWYVDGVEVHNAKTKPREEQFNSTFRVVSVLTVVHQDWLNGKEYKCKVSNKALPAPIEKTISKTKGQPREPQVYTLPPSQEEMTKNQVSLTCLVKGFYPSDIAVEWESSGQPENNYNTTPPMLDSDGSFFLYSKLTVDKSRWQEGNVFSCSVMHEALHNHYTQKSLSLSPG

SEQ ID NO: 205 - protein, 329 aa, Artificial Sequence
  IgG-pI-Iso3-434S (P)  (Figure 92J)
ASTKGPSVFPLAPSSKSTSEGTAALGCLVKDYFPEPVTVSWNSGALTSGVHTFPAVLQSSGLYSLSSVVTVPSSNFGTQTYTCNVDHKPSNTKVDKTVEPKSCDTTHTCPPCPAPELLGGPSVFLFPPKPKDTLMISRTPEVTCVVVDVSHEDPEVQFNWYVDGVEVHNAKTKPREEQFNSTFRVVSVLTVVHQDWLNGKEYKCKVSNKALPAPIEKTISKTKGQPREPQVYTLPPSQEEMTKNQVSLTCLVKGFYPSDIAVEWESSGQPENNYNTTPPMLDSDGSFFLYSKLTVDKSRWQEGNVFSCSVMHEALHNHYTQKSLSLSPG

SEQ ID NO: 206 - protein, 329 aa, Artificial Sequence
  IgG-pI-Iso3-434S  (Figure 92J)
ASTKGPSVFPLAPSSKSTSESTAALGCLVKDYFPEPVTVSWNSGALTSGVHTFPAVLQSSGLYSLSSVVTVPSSSFGTQTYTCNVDHKPSNTKVDKTVEPKSCDTTHTCPPCPAPELLGGPSVFLFPPKPKDTLMISRTPEVTCVVVDVSHEDPEVQFNWYVDGVEVHNAKTKPREEQFNSTFRVVSVLTVVHQDWLNGKEYKCKVSNKALPAPIEKTISKTKGQPREPQVYTLPPSQEEMTKNQVSLTCLVKGFYPSDIAVEWESSGQPENNYNTTPPMLDSDGSFFLYSKLTVDKSRWQEGNVFSCSVMHEALHNHYTQKSLSLSPG

SEQ ID NO: 207 - protein, 329 aa, Artificial Sequence
  IgG-pI-Iso3-434S (R)  (Figure 92J)
ASTKGPSVFPLAPSSKSTSESTAALGCLVKDYFPEPVTVSWNSGALTSGVHTFPAVLQSSGLYSLSSVVTVPSSNLGTQTYTCNVDHKPSNTKVDKTVEPKSCDTTHTCPPCPAPELLGGPSVFLFPPKPKDTLMISRTPEVTCVVVDVSHEDPEVQFNWYVDGVEVHNAKTKPREEQFNSTFRVVSVLTVVHQDWLNGKEYKCKVSNKALPAPIEKTISKTKGQPREPQVYTLPPSQEEMTKNQVSLTCLVKGFYPSDIAVEWESSGQPENNYNTTPPMLDSDGSFFLYSKLTVDKSRWQEGNVFSCSVMHEALHNHYTQKSLSLSPG

SEQ ID NO: 208 - protein, 329 aa, Artificial Sequence
  IgG-pI-Iso3-434S (S)  (Figure 92K)
ASTKGPSVFPLAPSSKSTSESTAALGCLVKDYFPEPVTVSWNSGALTSGVHTFPAVLQSSGLYSLSSVVTVPSSNFGTQTYICNVDHKPSNTKVDKTVEPKSCDTTHTCPPCPAPELLGGPSVFLFPPKPKDTLMISRTPEVTCVVVDVSHEDPEVQFNWYVDGVEVHNAKTKPREEQFNSTFRVVSVLTVVHQDWLNGKEYKCKVSNKALPAPIEKTISKTKGQPREPQVYTLPPSQEEMTKNQVSLTCLVKGFYPSDIAVEWESSGQPENNYNTTPPMLDSDGSFFLYSKLTVDKSRWQEGNVFSCSVMHEALHNHYTQKSLSLSPG

SEQ ID NO: 209 - protein, 329 aa, Artificial Sequence
  IgG-pI-Iso3-434S (T)  (Figure 92K)
ASTKGPSVFPLAPSSKSTSESTAALGCLVKDYFPEPVTVSWNSGALTSGVHTFPAVLQSSGLYSLSSVVTVPSSNFGTQTYTCNVNHKPSNTKVDKTVEPKSCDTTHTCPPCPAPELLGGPSVFLFPPKPKDTLMISRTPEVTCVVVDVSHEDPEVQFNWYVDGVEVHNAKTKPREEQFNSTFRVVSVLTVVHQDWLNGKEYKCKVSNKALPAPIEKTISKTKGQPREPQVYTLPPSQEEMTKNQVSLTCLVKGFYPSDIAVEWESSGQPENNYNTTPPMLDSDGSFFLYSKLTVDKSRWQEGNVFSCSVMHEALHNHYTQKSLSLSPG

SEQ ID NO: 210 - protein, 329 aa, Artificial Sequence
  IgG-pI-Iso3-434S (U)  (Figure 92K)
ASTKGPSVFPLAPSSKSTSESTAALGCLVKDYFPEPVTVSWNSGALTSGVHTFPAVLQSSGLYSLSSVVTVPSSNFGTQTYTCNVDHKPSNTKVDKKVEPKSCDTTHTCPPCPAPELLGGPSVFLFPPKPKDTLMISRTPEVTCVVVDVSHEDPEVQFNWYVDGVEVHNAKTKPREEQFNSTFRVVSVLTVVHQDWLNGKEYKCKVSNKALPAPIEKTISKTKGQPREPQVYTLPPSQEEMTKNQVSLTCLVKGFYPSDIAVEWESSGQPENNYNTTPPMLDSDGSFFLYSKLTVDKSRWQEGNVFSCSVMHEALHNHYTQKSLSLSPG

SEQ ID NO: 211 - protein, 329 aa, Artificial Sequence
  IgG-pI-Iso3-434S (V)  (Figure 92K)
ASTKGPSVFPLAPSSKSTSGGTAALGCLVKDYFPEPVTVSWNSGALTSGVHTFPAVLQSSGLYSLSSVVTVPSSNFGTQTYTCNVDHKPSNTKVDKTVEPKSCDTTHTCPPCPAPELLGGPSVFLFPPKPKDTLMISRTPEVTCVVVDVSHEDPEVQFNWYVDGVEVHNAKTKPREEQFNSTFRVVSVLTVVHQDWLNGKEYKCKVSNKALPAPIEKTISKTKGQPREPQVYTLPPSQEEMTKNQVSLTCLVKGFYPSDIAVEWESSGQPENNYNTTPPMLDSDGSFFLYSKLTVDKSRWQEGNVFSCSVMHEALHNHYTQKSLSLSPG

SEQ ID NO: 212 - protein, 329 aa, Artificial Sequence
  IgG-pI-Iso3-SL  (Figure 92K)
ASTKGPSVFPLAPSSKSTSESTAALGCLVKDYFPEPVTVSWNSGALTSGVHTFPAVLQSSGLYSLSSVVTVPSSSLGTQTYTCNVDHKPSNTKVDKTVEPKSCDTTHTCPPCPAPELLGGPSVFLFPPKPKDTLMISRTPEVTCVVVDVSHEDPEVQFNWYVDGVEVHNAKTKPREEQFNSTFRVVSVLTVVHQDWLNGKEYKCKVSNKALPAPIEKTISKTKGQPREPQVYTLPPSQEEMTKNQVSLTCLVKGFYPSDIAVEWESSGQPENNYNTTPPMLDSDGSFFLYSKLTVDKSRWQEGNVFSCSVMHEALHNHYTQKSLSLSPG

SEQ ID NO: 213 - protein, 329 aa, Artificial Sequence
  IgG-pI-Iso3-SL (B)  (Figure 92K)
ASTKGPSVFPLAPSSKSTSESTAALGCLVKDYFPEPVTVSWNSGALTSGVHTFPAVLQSSGLYSLSSVVTVPSSNFGTQTYICNVNHKPSNTKVDKTVEPKSCDTTHTCPPCPAPELLGGPSVFLFPPKPKDTLMISRTPEVTCVVVDVSHEDPEVQFNWYVDGVEVHNAKTKPREEQFNSTFRVVSVLTVVHQDWLNGKEYKCKVSNKALPAPIEKTISKTKGQPREPQVYTLPPSQEEMTKNQVSLTCLVKGFYPSDIAVEWESSGQPENNYNTTPPMLDSDGSFFLYSKLTVDKSRWQEGNVFSCSVMHEALHNHYTQKSLSLSPG

SEQ ID NO: 214 - protein, 329 aa, Artificial Sequence
  IgG-pI-Iso3-SL (C)  (Figure 92L)
ASTKGPSVFPLAPSSKSTSESTAALGCLVKDYFPEPVTVSWNSGALTSGVHTFPAVLQSSGLYSLSSVVTVPSSNFGTQTYTCNVDHKPSNTKVDKKVEPKSCDKTHTCPPCPAPELLGGPSVFLFPPKPKDTLMISRTPEVTCVVVDVSHEDPEVQFNWYVDGVEVHNAKTKPREEQFNSTFRVVSVLTVVHQDWLNGKEYKCKVSNKALPAPIEKTISKTKGQPREPQVYTLPPSQEEMTKNQVSLTCLVKGFYPSDIAVEWESSGQPENNYNTTPPMLDSDGSFFLYSKLTVDKSRWQEGNVFSCSVMHEALHNHYTQKSLSLSPG

SEQ ID NO: 215 - protein, 329 aa, Artificial Sequence
  IgG-pI-Iso3-SL (D)  (Figure 92L)
ASTKGPSVFPLAPSSKSTSEGTAALGCLVKDYFPEPVTVSWNSGALTSGVHTFPAVLQSSGLYSLSSVVTVPSSSLGTQTYTCNVDHKPSNTKVDKTVEPKSCDTTHTCPPCPAPELLGGPSVFLFPPKPKDTLMISRTPEVTCVVVDVSHEDPEVQFNWYVDGVEVHNAKTKPREEQFNSTFRVVSVLTVVHQDWLNGKEYKCKVSNKALPAPIEKTISKTKGQPREPQVYTLPPSQEEMTKNQVSLTCLVKGFYPSDIAVEWESSGQPENNYNTTPPMLDSDGSFFLYSKLTVDKSRWQEGNVFSCSVMHEALHNHYTQKSLSLSPG

SEQ ID NO: 216 - protein, 329 aa, Artificial Sequence
  IgG-pI-Iso3-SL (E)  (Figure 92L)
ASTKGPSVFPLAPSSKSTSGGTAALGCLVKDYFPEPVTVSWNSGALTSGVHTFPAVLQSSGLYSLSSVVTVPSSSLGTQTYTCNVDHKPSNTKVDKTVEPKSCDTTHTCPPCPAPELLGGPSVFLFPPKPKDTLMISRTPEVTCVVVDVSHEDPEVQFNWYVDGVEVHNAKTKPREEQFNSTFRVVSVLTVVHQDWLNGKEYKCKVSNKALPAPIEKTISKTKGQPREPQVYTLPPSQEEMTKNQVSLTCLVKGFYPSDIAVEWESSGQPENNYNTTPPMLDSDGSFFLYSKLTVDKSRWQEGNVFSCSVMHEALHNHYTQKSLSLSPG

SEQ ID NO: 217 - protein, 329 aa, Artificial Sequence; identical to SEQ ID NO: 184
  IgG-pI-Iso3  (Figure 92L)

SEQ ID NO: 218 - protein, 329 aa, Artificial Sequence; identical to SEQ ID NO: 184
  IgG-pI-Iso3 (B)  (Figure 92L)

SEQ ID NO: 219 - protein, 329 aa, Artificial Sequence; identical to SEQ ID NO: 184
  IgG-pI-Iso3 (C)  (Figure 92L)

SEQ ID NO: 220 - protein, 329 aa, Artificial Sequence; identical to SEQ ID NO: 184
  IgG-pI-Iso3 (D)  (Figure 92M)

SEQ ID NO: 221 - protein, 327 aa, Artificial Sequence
  IgG-pI-Iso3 (E)  (Figure 92M)
ASTKGPSVFPLAPCSRSTSESTAALGCLVKDYFPEPVTVSWNSGALTSGVHTFPAVLQSSGLYSLSSVVTVPSSNFGTQTYTCNVDHKPSNTKVDKTVERKCCVECPPCPAPELLGGPSVFLFPPKPKDTLMISRTPEVTCVVVDVSHEDPEVKFNWYVDGVEVHNAKTKPREEQYNSTYRVVSVLTVLHQDWLNGKEYKCKVSNKALPAPIEKTISKAKGQPREPQVYTLPPSREEMTKNQVSLTCLVKGFYPSDIAVEWESNGQPENNYKTTPPVLDSDGSFFLYSKLTVDKSRWQQGNVFSCSVMHEALHNHYTQKSLSLSPGK

SEQ ID NO: 222 - protein, 329 aa, Artificial Sequence
  IgG-pI-Iso3-charges-only  (Figure 92M)
ASTKGPSVFPLAPSSKSTSEGTAALGCLVKDYFPEPVTVSWNSGALTSGVHTFPAVLQSSGLYSLSSVVTVPSSSLGTQTYICNVDHKPSNTKVDKTVEPKSCDTTHTCPPCPAPELLGGPSVFLFPPKPKDTLMISRTPEVTCVVVDVSHEDPEVQFNWYVDGVEVHNAKTKPREEQYNSTYRVVSVLTVLHQDWLNGKEYKCKVSNKALPAPIEKTISKAKGQPREPQVYTLPPSQEEMTKNQVSLTCLVKGFYPSDIAVEWESNGQPENNYNTTPPVLDSDGSFFLYSKLTVDKSRWQEGNVFSCSVMHEALHNHYTQKSLSLSPG

SEQ ID NO: 223 - protein, 325 aa, Artificial Sequence
  IgG-pI-Iso2-charges-only  (Figure 92M)
ASTKGPSVFPLAPSSKSTSEGTAALGCLVKDYFPEPVTVSWNSGALTSGVHTFPAVLQSSGLYSLSSVVTVPSSSLGTQTYICNVDHKPSNTKVDKTVEPKSCVECPPCPAPPVAGPSVFLFPPKPKDTLMISRTPEVTCVVVDVSHEDPEVQFNWYVDGVEVHNAKTKPREEQYNSTYRVVSVLTVLHQDWLNGKEYKCKVSNKGLPAPIEKTISKAKGQPREPQVYTLPPSQEEMTKNQVSLTCLVKGFYPSDIAVEWESNGQPENNYNTTPPVLDSDGSFFLYSKLTVDKSRWQEGNVFSCSVMHEALHNHYTQKSLSLSPG

SEQ ID NO: 224 - protein, 330 aa, Artificial Sequence
  IgG-pI-Iso2-charges-only  (Figure 92M)
ASTKGPSVFPLAPSSRSTSESTAALGCLVKDYFPEPVTVSWNSGALTSGVHTFPAVLQSSGLYSLSSVVTVPSSNFGTQTYTCNVDHKPSNTKVDKTVERKSCDKTHTCPPCPAPELLGGPSVFLFPPKPKDTLMISRTPEVTCVVVDVSHEDPEVKFNWYVDGVEVHNAKTKPREEQYNSTYRVVSVLTVLHQDWLNGKEYKCKVSNKALPAPIEKTISKAKGQPREPQVYTLPPSREEMTKNQVSLTCLVKGFYPSDIAVEWESNGQPENNYKTTPPVLDSDGSFFLYSKLTVDKSRWQQGNVFSCSVMHEALHNHYTQKSLSLSPGK

SEQ ID NO: 225 - protein, 329 aa, Artificial Sequence
  IgG-pI-Iso3-SL-434S  (Figure 92M)
ASTKGPSVFPLAPSSKSTSESTAALGCLVKDYFPEPVTVSWNSGALTSGVHTFPAVLQSSGLYSLSSVVTVPSSSLGTQTYTCNVDHKPSNTKVDKTVEPKSCDTTHTCPPCPAPELLGGPSVFLFPPKPKDTLMISRTPEVTCVVVDVSHEDPEVQFNWYVDGVEVHNAKTKPREEQFNSTFRVVSVLTVVHQDWLNGKEYKCKVSNKALPAPIEKTISKTKGQPREPQVYTLPPSQEEMTKNQVSLTCLVKGFYPSDIAVEWESSGQPENNYNTTPPMLDSDGSFFLYSKLTVDKSRWQEGNVFSCSVMHEALHSHYTQKSLSLSPG

SEQ ID NO: 226 - protein, 329 aa, Artificial Sequence
  IgG-pI-Iso3-SL-428L/434S  (Figure 92N)
ASTKGPSVFPLAPSSKSTSESTAALGCLVKDYFPEPVTVSWNSGALTSGVHTFPAVLQSSGLYSLSSVVTVPSSSLGTQTYTCNVDHKPSNTKVDKTVEPKSCDTTHTCPPCPAPELLGGPSVFLFPPKPKDTLMISRTPEVTCVVVDVSHEDPEVQFNWYVDGVEVHNAKTKPREEQFNSTFRVVSVLTVVHQDWLNGKEYKCKVSNKALPAPIEKTISKTKGQPREPQVYTLPPSQEEMTKNQVSLTCLVKGFYPSDIAVEWESSGQPENNYNTTPPMLDSDGSFFLYSKLTVDKSRWQEGNVFSCSVLHEALHSHYTQKSLSLSPG

SEQ ID NO: 227 - protein, 329 aa, Artificial Sequence
  IgG-pI-Iso3-SL-428L/434S (B)  (Figure 92N)
ASTKGPSVFPLAPSSKSTSEGTAALGCLVKDYFPEPVTVSWNSGALTSGVHTFPAVLQSSGLYSLSSVVTVPSSSLGTQTYTCNVDHKPSNTKVDKTVEPKSCDTTHTCPPCPAPELLGGPSVFLFPPKPKDTLMISRTPEVTCVVVDVSHEDPEVQFNWYVDGVEVHNAKTKPREEQFNSTFRVVSVLTVVHQDWLNGKEYKCKVSNKALPAPIEKTISKTKGQPREPQVYTLPPSQEEMTKNQVSLTCLVKGFYPSDIAVEWESSGQPENNYNTTPPMLDSDGSFFLYSKLTVDKSRWQEGNVFSCSVMHEALHSHYTQKSLSLSPG

SEQ ID NO: 228 - protein, 329 aa, Artificial Sequence
  IgG-pI-Iso3-SL-428L/434S (C)  (Figure 92N)
ASTKGPSVFPLAPSSKSTSGGTAALGCLVKDYFPEPVTVSWNSGALTSGVHTFPAVLQSSGLYSLSSVVTVPSSSLGTQTYTCNVDHKPSNTKVDKTVEPKSCDTTHTCPPCPAPELLGGPSVFLFPPKPKDTLMISRTPEVTCVVVDVSHEDPEVQFNWYVDGVEVHNAKTKPREEQFNSTFRVVSVLTVVHQDWLNGKEYKCKVSNKALPAPIEKTISKTKGQPREPQVYTLPPSQEEMTKNQVSLTCLVKGFYPSDIAVEWESSGQPENNYNTTPPMLDSDGSFFLYSKLTVDKSRWQEGNVFSCSVMHEALHSHYTQKSLSLSPG

SEQ ID NO: 229 - protein, 325 aa, Artificial Sequence; identical to SEQ ID NO: 20
  IgG-pI-Iso2-SL  (Figure 92N)

SEQ ID NO: 230 - protein, 325 aa, Artificial Sequence; identical to SEQ ID NO: 61
  IgG-pI-Iso2-SL-434S  (Figure 92N)

SEQ ID NO: 231 - protein, 329 aa, Artificial Sequence
  IgG-pI-Iso3-charges-only-434S  (Figure 92N)
ASTKGPSVFPLAPSSKSTSEGTAALGCLVKDYFPEPVTVSWNSGALTSGVHTFPAVLQSSGLYSLSSVVTVPSSSLGTQTYICNVDHKPSNTKVDKTVEPKSCDTTHTCPPCPAPELLGGPSVFLFPPKPKDTLMISRTPEVTCVVVDVSHEDPEVQFNWYVDGVEVHNAKTKPREEQYNSTYRVVSVLTVLHQDWLNGKEYKCKVSNKALPAPIEKTISKAKGQPREPQVYTLPPSQEEMTKNQVSLTCLVKGFYPSDIAVEWESNGQPENNYNTTPPVLDSDGSFFLYSKLTVDKSRWQEGNVFSCSVMHEALHSHYTQKSLSLSPG

SEQ ID NO: 232 - protein, 325 aa, Artificial Sequence
  IgG-pI-Iso2-charges-only-434S  (Figure 92O)
ASTKGPSVFPLAPSSKSTSEGTAALGCLVKDYFPEPVTVSWNSGALTSGVHTFPAVLQSSGLYSLSSVVTVPSSSLGTQTYICNVDHKPSNTKVDKTVEPKSCVECPPCPAPPVAGPSVFLFPPKPKDTLMISRTPEVTCVVVDVSHEDPEVQFNWYVDGVEVHNAKTKPREEQYNSTYRVVSVLTVLHQDWLNGKEYKCKVSNKGLPAPIEKTISKAKGQPREPQVYTLPPSQEEMTKNQVSLTCLVKGFYPSDIAVEWESNGQPENNYNTTPPVLDSDGSFFLYSKLTVDKSRWQEGNVFSCSVMHEALHSHYTQKSLSLSPG

SEQ ID NO: 233 - protein, 327 aa, Artificial Sequence
  IgG-pI-Iso2-charges-only-434S (B)  (Figure 92O)
ASTKGPSVFPLAPCSRSTSESTAALGCLVKDYFPEPVTVSWNSGALTSGVHTFPAVLQSSGLYSLSSVVTVPSSNFGTQTYTCNVDHKPSNTKVDKTVERKCCVECPPCPAPELLGGPSVFLFPPKPKDTLMISRTPEVTCVVVDVSHEDPEVKFNWYVDGVEVHNAKTKPREEQYNSTYRVVSVLTVLHQDWLNGKEYKCKVSNKALPAPIEKTISKAKGQPREPQVYTLPPSREEMTKNQVSLTCLVKGFYPSDIAVEWESNGQPENNYKTTPPVLDSDGSFFLYSKLTVDKSRWQQGNVFSCSVMHEALHSHYTQKSLSLSPGK

SEQ ID NO: 234 - protein, 330 aa, Artificial Sequence
  IgG-pI-Iso2-charges-only-434S (C)  (Figure 92O)
ASTKGPSVFPLAPSSRSTSESTAALGCLVKDYFPEPVTVSWNSGALTSGVHTFPAVLQSSGLYSLSSVVTVPSSNFGTQTYTCNVDHKPSNTKVDKTVERKSCDKTHTCPPCPAPELLGGPSVFLFPPKPKDTLMISRTPEVTCVVVDVSHEDPEVKFNWYVDGVEVHNAKTKPREEQYNSTYRVVSVLTVLHQDWLNGKEYKCKVSNKALPAPIEKTISKAKGQPREPQVYTLPPSREEMTKNQVSLTCLVKGFYPSDIAVEWESNGQPENNYKTTPPVLDSDGSFFLYSKLTVDKSRWQQGNVFSCSVMHEALHSHYTQKSLSLSPGK

SEQ ID NO: 235 - protein, 329 aa, Artificial Sequence
  IgG1_pI(7)-434S  (Figure 92O)
ASTKGPSVFPLAPSSESTSGGTAALGCLVKDYFPEPVTVSWNSGALTSGVHTFPAVLQSSGLYSLSSVVTVPSSSLGTQTYICNVNHEPSNTEVDKKVEPKSCDKTHTCPPCPAPELLGGPSVFLFPPKPKDTLMISRTPEVTCVVVDVSHEDPEVEFNWYVDGVEVHNAKTKPREEQYNSTYRVVSVLTVLHQDWLNGKEYKCKVSNKALPAPIEKTISKAKGQPREPQVYTLPPSEEEMTKNQVSLTCLVKGFYPSDIAVEWESNGQPENNYETTPPVLDSDGSFFLYSKLTVDKSRWQQGNVFSCSVMHEALHSHYTQKSLSLSPG

SEQ ID NO: 236 - protein, 328 aa, Artificial Sequence
  IgG1/2_pI(7)-434S  (Figure 92O)
ASTKGPSVFPLAPSSESTSGGTAALGCLVKDYFPEPVTVSWNSGALTSGVHTFPAVLQSSGLYSLSSVVTVPSSSLGTQTYICNVNHEPSNTEVDKKVEPKSCDKTHTCPPCPAPPVAGPSVFLFPPKPKDTLMISRTPEVTCVVVDVSHEDPEVEFNWYVDGVEVHNAKTKPREEQFNSTFRVVSVLTVVHQDWLNGKEYKCKVSNKGLPAPIEKTISKTKGQPREPQVYTLPPSEEEMTKNQVSLTCLVKGFYPSDIAVEWESNGQPENNYETTPPMLDSDGSFFLYSKLTVDKSRWQQGNVFSCSVMHEALHSHYTQKSLSLSPG

SEQ ID NO: 237 - protein, 325 aa, Artificial Sequence
  IgG1/2_pI(7)-434S (B)  (Figure 92O)
ASTKGPSVFPLAPSSKSTSEGTAALGCLVKDYFPEPVTVSWNSGALTSGVHTFPAVLQSSGLYSLSSVVTVPSSSLGTQTYICNVDHKPSNTKVDKTVEPKSCVECPPCPAPPVAGPSVFLFPPKPKDTLMISRTPEVTCVVVDVSHEDPEVQFNWYVDGVEVHNAKTKPREEQFNSTFRVVSVLTVVHQDWLNGKEYKCKVSNKGLPAPIEKTISKTKGQPREPQVYTLPPSQEEMTKNQVSLTCLVKGFYPSDIAVEWESNGQPENNYNTTPPMLDSDGSFFLYSKLTVDKSRWQEGNVFSCSVMHEALHNHYTQKSLSLSPG

SEQ ID NO: 238 - protein, 329 aa, Artificial Sequence; identical to SEQ ID NO: 212
  IgG-pI-Iso3-SL  (Figure 92P)

SEQ ID NO: 239 - protein, 329 aa, Artificial Sequence; identical to SEQ ID NO: 212
  IgG-pI-Iso3-SL (B)  (Figure 92P)

SEQ ID NO: 240 - protein, 329 aa, Artificial Sequence; identical to SEQ ID NO: 212
  IgG-pI-Iso3-SL (C)  (Figure 92P)

SEQ ID NO: 241 - protein, 329 aa, Artificial Sequence; identical to SEQ ID NO: 225
  IgG-pI-Iso3-SL-434S  (Figure 92P)

SEQ ID NO: 242 - protein, 329 aa, Artificial Sequence; identical to SEQ ID NO: 225
  IgG-pI-Iso3-SL-434S (B)  (Figure 92P)

SEQ ID NO: 243 - protein, 329 aa, Artificial Sequence; identical to SEQ ID NO: 225
  IgG-pI-Iso3-SL-434S (C)  (Figure 92P)

SEQ ID NO: 244 - protein, 329 aa, Artificial Sequence; identical to SEQ ID NO: 226
  IgG-pI-Iso3-SL-428L/434S  (Figure 92Q)

SEQ ID NO: 245 - protein, 329 aa, Artificial Sequence; identical to SEQ ID NO: 226
  IgG-pI-Iso3-SL-428L/434S (B)  (Figure 92Q)

SEQ ID NO: 246 - protein, 329 aa, Artificial Sequence; identical to SEQ ID NO: 226
  IgG-pI-Iso3-SL-428L/434S (C)  (Figure 92Q)

SEQ ID NO: 247 - protein, 329 aa, Artificial Sequence; identical to SEQ ID NO: 225
  IgG-pI-Iso3-SL-434S  (Figure 92Q)

SEQ ID NO: 248 - protein, 329 aa, Artificial Sequence; identical to SEQ ID NO: 186
  IgG-pI-Iso3-434S  (Figure 92Q)

SEQ ID NO: 249 - protein, 329 aa, Artificial Sequence; identical to SEQ ID NO: 186
  IgG-pI-Iso2-SL-434S  (Figure 92Q)

SEQ ID NO: 250 - protein, 330 aa, Artificial Sequence
  IgG-pI-CH1-v4  (Figure 92R)
AETKGPSVFPLAPSSESTSGGTAALGCLVKDYFPEPVTVSWNSGALESGVHTFPAVLQSSGLYSLSSVVTVPSSSLGTQTYICNVNHKPSDTEVDKKVEPKSCDKTHTCPPCPAPELLGGPSVFLFPPKPKDTLMISRTPEVTCVVVDVSHEDPEVKFNWYVDGVEVHNAKTKPREEQYNSTYRVVSVLTVLHQDWLNGKEYKCKVSNKALPAPIEKTISKAKGQPREPQVYTLPPSREEMTKNQVSLTCLVKGFYPSDIAVEWESNGQPENNYKTTPPVLDSDGSFFLYSKLTVDKSRWQQGNVFSCSVMHEALHNHYTQKSLSLSPGK

SEQ ID NO: 251 - protein, 330 aa, Artificial Sequence
  IgG-pI-CH1-v25  (Figure 92R)
AETKGPSVFPLAPSSKSTSGGTAALGCLVKDYFPEPVTVSWNSGALESGVHTFPAVLQSSGLYSLSSVVTVPSSSLGTQTYICNVNHKPSDTEVDKKVEPKSCDKTHTCPPCPAPELLGGPSVFLFPPKPKDTLMISRTPEVTCVVVDVSHEDPEVKFNWYVDGVEVHNAKTKPREEQYNSTYRVVSVLTVLHQDWLNGKEYKCKVSNKALPAPIEKTISKAKGQPREPQVYTLPPSREEMTKNQVSLTCLVKGFYPSDIAVEWESNGQPENNYKTTPPVLDSDGSFFLYSKLTVDKSRWQQGNVFSCSVMHEALHNHYTQKSLSLSPGK

SEQ ID NO: 252 - protein, 330 aa, Artificial Sequence
  IgG-pI-CH1-v42  (Figure 92R)
ASTKGPSVFPLAPSSKSTSGGTAALGCLVKDYFPEPVTVSWNSGALESGVHTFPAVLQSSGLYSLSSVVTVPSSSLGTQTYICNVNHKPSDTEVDKKVEPKSCDKTHTCPPCPAPELLGGPSVFLFPPKPKDTLMISRTPEVTCVVVDVSHEDPEVKFNWYVDGVEVHNAKTKPREEQYNSTYRVVSVLTVLHQDWLNGKEYKCKVSNKALPAPIEKTISKAKGQPREPQVYTLPPSREEMTKNQVSLTCLVKGFYPSDIAVEWESNGQPENNYKTTPPVLDSDGSFFLYSKLTVDKSRWQQGNVFSCSVMHEALHNHYTQKSLSLSPGK

SEQ ID NO: 253 - protein, 330 aa, Artificial Sequence
  IgG-pI-CH1-v16  (Figure 92R)
ASTKGPSVFPLAPSSKSTSGGTAALGCLVKDYFPEPVTVSWNSGALTSGVHTFPAVLQSSGLYSLSSVVTVPSSSLGTQTYICNVNHKPSDTEVDKKVEPKSCDKTHTCPPCPAPELLGGPSVFLFPPKPKDTLMISRTPEVTCVVVDVSHEDPEVKFNWYVDGVEVHNAKTKPREEQYNSTYRVVSVLTVLHQDWLNGKEYKCKVSNKALPAPIEKTISKAKGQPREPQVYTLPPSREEMTKNQVSLTCLVKGFYPSDIAVEWESNGQPENNYKTTPPVLDSDGSFFLYSKLTVDKSRWQQGNVFSCSVMHEALHNHYTQKSLSLSPGK

SEQ ID NO: 254 - protein, 329 aa, Artificial Sequence
  IgG-pI-CH1-v4-SLFFV-Iso-434S  (Figure 92R)
AETKGPSVFPLAPSSESTSGGTAALGCLVKDYFPEPVTVSWNSGALESGVHTFPAVLQSSGLYSLSSVVTVPSSSLGTQTYICNVNHKPSDTEVDKKVEPKSCDKTHTCPPCPAPELLGGPSVFLFPPKPKDTLMISRTPEVTCVVVDVSHEDPEVQFNWYVDGVEVHNAKTKPREEQFNSTFRVVSVLTVVHQDWLNGKEYKCKVSNKALPAPIEKTISKTKGQPREPQVYTLPPSQEEMTKNQVSLTCLVKGFYPSDIAVEWESSGQPENNYNTTPPMLDSDGSFFLYSKLTVDKSRWQEGNVFSCSVMHEALHSHYTQKSLSLSPG

SEQ ID NO: 255 - protein, 329 aa, Artificial Sequence
  IgG-pI-CH1-v25-SLFFV-Iso-434S  (Figure 92R)
AETKGPSVFPLAPSSKSTSGGTAALGCLVKDYFPEPVTVSWNSGALESGVHTFPAVLQSSGLYSLSSVVTVPSSSLGTQTYICNVNHKPSDTEVDKKVEPKSCDKTHTCPPCPAPELLGGPSVFLFPPKPKDTLMISRTPEVTCVVVDVSHEDPEVQFNWYVDGVEVHNAKTKPREEQFNSTFRVVSVLTVVHQDWLNGKEYKCKVSNKALPAPIEKTISKTKGQPREPQVYTLPPSQEEMTKNQVSLTCLVKGFYPSDIAVEWESSGQPENNYNTTPPMLDSDGSFFLYSKLTVDKSRWQEGNVFSCSVMHEALHSHYTQKSLSLSPG

SEQ ID NO: 256 - protein, 329 aa, Artificial Sequence
  IgG-pI-CH1-v42-SLFFV-Iso-434S  (Figure 92S)
ASTKGPSVFPLAPSSKSTSGGTAALGCLVKDYFPEPVTVSWNSGALESGVHTFPAVLQSSGLYSLSSVVTVPSSSLGTQTYICNVNHKPSDTEVDKKVEPKSCDKTHTCPPCPAPELLGGPSVFLFPPKPKDTLMISRTPEVTCVVVDVSHEDPEVQFNWYVDGVEVHNAKTKPREEQFNSTFRVVSVLTVVHQDWLNGKEYKCKVSNKALPAPIEKTISKTKGQPREPQVYTLPPSQEEMTKNQVSLTCLVKGFYPSDIAVEWESSGQPENNYNTTPPMLDSDGSFFLYSKLTVDKSRWQEGNVFSCSVMHEALHSHYTQKSLSLSPG

SEQ ID NO: 257 - protein, 329 aa, Artificial Sequence
  IgG-pI-CH1-v16-SLFFV-Iso-434S  (Figure 92S)
ASTKGPSVFPLAPSSKSTSGGTAALGCLVKDYFPEPVTVSWNSGALTSGVHTFPAVLQSSGLYSLSSVVTVPSSSLGTQTYICNVNHKPSDTEVDKKVEPKSCDKTHTCPPCPAPELLGGPSVFLFPPKPKDTLMISRTPEVTCVVVDVSHEDPEVQFNWYVDGVEVHNAKTKPREEQFNSTFRVVSVLTVVHQDWLNGKEYKCKVSNKALPAPIEKTISKTKGQPREPQVYTLPPSQEEMTKNQVSLTCLVKGFYPSDIAVEWESSGQPENNYNTTPPMLDSDGSFFLYSKLTVDKSRWQEGNVFSCSVMHEALHSHYTQKSLSLSPG

SEQ ID NO: 258 - protein, 329 aa, Artificial Sequence
  IgG-pI-CH1-v4-SL-Iso-434S  (Figure 92S)
AETKGPSVFPLAPSSESTSGGTAALGCLVKDYFPEPVTVSWNSGALESGVHTFPAVLQSSGLYSLSSVVTVPSSSLGTQTYICNVNHKPSDTEVDKKVEPKSCDKTHTCPPCPAPELLGGPSVFLFPPKPKDTLMISRTPEVTCVVVDVSHEDPEVQFNWYVDGVEVHNAKTKPREEQYNSTYRVVSVLTVLHQDWLNGKEYKCKVSNKALPAPIEKTISKTKGQPREPQVYTLPPSQEEMTKNQVSLTCLVKGFYPSDIAVEWESSGQPENNYNTTPPMLDSDGSFFLYSKLTVDKSRWQEGNVFSCSVMHEALHSHYTQKSLSLSPG

SEQ ID NO: 259 - protein, 329 aa, Artificial Sequence
  IgG-pI-CH1-v25-SL-Iso-434S  (Figure 92S)
AETKGPSVFPLAPSSKSTSGGTAALGCLVKDYFPEPVTVSWNSGALESGVHTFPAVLQSSGLYSLSSVVTVPSSSLGTQTYICNVNHKPSDTEVDKKVEPKSCDKTHTCPPCPAPELLGGPSVFLFPPKPKDTLMISRTPEVTCVVVDVSHEDPEVQFNWYVDGVEVHNAKTKPREEQYNSTYRVVSVLTVLHQDWLNGKEYKCKVSNKALPAPIEKTISKTKGQPREPQVYTLPPSQEEMTKNQVSLTCLVKGFYPSDIAVEWESSGQPENNYNTTPPMLDSDGSFFLYSKLTVDKSRWQEGNVFSCSVMHEALHSHYTQKSLSLSPG

SEQ ID NO: 260 - protein, 329 aa, Artificial Sequence
  IgG-pI-CH1-v42-SL-Iso-434S  (Figure 92S)
ASTKGPSVFPLAPSSKSTSGGTAALGCLVKDYFPEPVTVSWNSGALESGVHTFPAVLQSSGLYSLSSVVTVPSSSLGTQTYICNVNHKPSDTEVDKKVEPKSCDKTHTCPPCPAPELLGGPSVFLFPPKPKDTLMISRTPEVTCVVVDVSHEDPEVQFNWYVDGVEVHNAKTKPREEQYNSTYRVVSVLTVLHQDWLNGKEYKCKVSNKALPAPIEKTISKTKGQPREPQVYTLPPSQEEMTKNQVSLTCLVKGFYPSDIAVEWESSGQPENNYNTTPPMLDSDGSFFLYSKLTVDKSRWQEGNVFSCSVMHEALHSHYTQKSLSLSPG

SEQ ID NO: 261 - protein, 329 aa, Artificial Sequence
  IgG-pI-CH1-v16-SL-Iso-434S  (Figure 92S)
ASTKGPSVFPLAPSSKSTSGGTAALGCLVKDYFPEPVTVSWNSGALTSGVHTFPAVLQSSGLYSLSSVVTVPSSSLGTQTYICNVNHKPSDTEVDKKVEPKSCDKTHTCPPCPAPELLGGPSVFLFPPKPKDTLMISRTPEVTCVVVDVSHEDPEVQFNWYVDGVEVHNAKTKPREEQYNSTYRVVSVLTVLHQDWLNGKEYKCKVSNKALPAPIEKTISKTKGQPREPQVYTLPPSQEEMTKNQVSLTCLVKGFYPSDIAVEWESSGQPENNYNTTPPMLDSDGSFFLYSKLTVDKSRWQEGNVFSCSVMHEALHSHYTQKSLSLSPG

SEQ ID NO: 262 - protein, 329 aa, Artificial Sequence
  IgG1-pI-IF16-ISO  (Figure 92T)
ASTKGPSVFPLAPSSKSTSGGTAALGCLVKDYFPEPVTVSWNSGALESGVHTFPAVLQSSGLYSLSSVVTVPSSSLGTQTYICNVNHKPSDTEVDKKVEPKSCDKTHTCPPCPAPELLGGPSVFLFPPKPKDTLMISRTPEVTCVVVDVSHEDPEVQFNWYVDGVEVHNAKTKPREEQYNSTYRVVSVLTVLHQDWLNGKEYKCKVSNKALPAPIEKTISKAKGQPREPQVYTLPPSQEEMTKNQVSLTCLVKGFYPSDIAVEWESSGQPENNYNTTPPMLDSDGSFFLYSKLTVDKSRWQEGNVFSCSVMHEALHNHYTQKSLSLSPG

SEQ ID NO: 263 - protein, 329 aa, Artificial Sequence
  IgG1-pI-IF10-ISO  (Figure 92T)
ASTKGPSVFPLAPSSKSTSGGTAALGCLVKDYFPEPVTVSWNSGALTSGVHTFPAVLQSSGLYSLSSVVTVPSSSLGTQTYICNVNHKPSDTEVDKKVEPKSCDKTHTCPPCPAPELLGGPSVFLFPPKPKDTLMISRTPEVTCVVVDVSHEDPEVQFNWYVDGVEVHNAKTKPREEQYNSTYRVVSVLTVLHQDWLNGKEYKCKVSNKALPAPIEKTISKAKGQPREPQVYTLPPSQEEMTKNQVSLTCLVKGFYPSDIAVEWESSGQPENNYNTTPPMLDSDGSFFLYSKLTVDKSRWQEGNVFSCSVMHEALHNHYTQKSLSLSPG

SEQ ID NO: 264 - protein, 325 aa, Artificial Sequence
  IgG2-pI-IF10-ISO-N434S  (Figure 92T)
ASTKGPSVFPLAPCSRSTSESTAALGCLVKDYFPEPVTVSWNSGALTSGVHTFPAVLQSSGLYSLSSVVTVPSSNFGTQTYTCNVDHEPSDTKVDKTVERKCCVECPPCPAPPVAGPSVFLFPPKPKDTLMISRTPEVTCVVVDVSHEDPEVQFNWYVDGVEVHNAKTKPREEQFNSTFRVVSVLTVVHQDWLNGKEYKCKVSNKGLPAPIEKTISKTKGQPREPQVYTLPPSQEEMTKNQVSLTCLVKGFYPSDIAVEWESSGQPENNYNTTPPMLDSDGSFFLYSKLTVDKSRWQEGNVFSCSVMHEALHSHYTQKSLSLSPG

SEQ ID NO: 265 - protein, 325 aa, Artificial Sequence
  IgG2-pI-IF16-ISO-N434S  (Figure 92T)
ASTKGPSVFPLAPCSRSTSESTAALGCLVKDYFPEPVTVSWNSGALESGVHTFPAVLQSSGLYSLSSVVTVPSSNFGTQTYTCNVDHEPSDTKVDKTVERKCCVECPPCPAPPVAGPSVFLFPPKPKDTLMISRTPEVTCVVVDVSHEDPEVQFNWYVDGVEVHNAKTKPREEQFNSTFRVVSVLTVVHQDWLNGKEYKCKVSNKGLPAPIEKTISKTKGQPREPQVYTLPPSQEEMTKNQVSLTCLVKGFYPSDIAVEWESSGQPENNYNTTPPMLDSDGSFFLYSKLTVDKSRWQEGNVFSCSVMHEALHSHYTQKSLSLSPG

SEQ ID NO: 266 - protein, 329 aa, Artificial Sequence; identical to SEQ ID NO: 256
  Hybrid-pI-IF16-ISO-N434S  (Figure 92T)

SEQ ID NO: 267 - protein, 329 aa, Artificial Sequence; identical to SEQ ID NO: 257
  Hybrid-pI-IF10-ISO-N434S  (Figure 92T)

SEQ ID NO: 268 - protein, 329 aa, Artificial Sequence
  Hybrid-2-1-2-pI-IF16-ISO-N434S  (Figure 92U)
ASTKGPSVFPLAPSSRSTSESTAALGCLVKDYFPEPVTVSWNSGALESGVHTFPAVLQSSGLYSLSSVVTVPSSNFGTQTYTCNVDHEPSDTEVDKTVEPKSCDKTHTCPPCPAPELLGGPSVFLFPPKPKDTLMISRTPEVTCVVVDVSHEDPEVQFNWYVDGVEVHNAKTKPREEQFNSTFRVVSVLTVVHQDWLNGKEYKCKVSNKALPAPIEKTISKTKGQPREPQVYTLPPSQEEMTKNQVSLTCLVKGFYPSDIAVEWESSGQPENNYNTTPPMLDSDGSFFLYSKLTVDKSRWQEGNVFSCSVMHEALHSHYTQKSLSLSPG

SEQ ID NO: 269 - protein, 329 aa, Artificial Sequence
  Hybrid-2-1-2-pI-IF10-ISO-N434S   (Figure 92U)
ASTKGPSVFPLAPSSRSTSESTAALGCLVKDYFPEPVTVSWNSGALTSGVHTFPAVLQSSGLYSLSSVVTVPSSNFGTQTYTCNVDHEPSDTEVDKTVEPKSCDKTHTCPPCPAPELLGGPSVFLFPPKPKDTLMISRTPEVTCVVVDVSHEDPEVQFNWYVDGVEVHNAKTKPREEQFNSTFRVVSVLTVVHQDWLNGKEYKCKVSNKALPAPIEKTISKTKGQPREPQVYTLPPSQEEMTKNQVSLTCLVKGFYPSDIAVEWESSGQPENNYNTTPPMLDSDGSFFLYSKLTVDKSRWQEGNVFSCSVMHEALHSHYTQKSLSLSPG

SEQ ID NO: 270 - protein, 329 aa, Artificial Sequence
  IgG1-IF10-CH1-Fc-charges   (Figure 92U)
ASTKGPSVFPLAPSSKSTSGGTAALGCLVKDYFPEPVTVSWNSGALESGVHTFPAVLQSSGLYSLSSVVTVPSSSLGTQTYICNVNHKPSDTEVDKKVEPKSCDKTHTCPPCPAPELLGGPSVFLFPPKPKDTLMISRTPEVTCVVVDVSHEDPEVKFNWYVDGVEVHNAKTKPREEQYNSTYRVVSVLTVLHQDWLNGKEYKCKVSNKALPAPIEKTISKAKGQPREPQVYTLPPSEEEMTKNQVSLTCLVKGFYPSDIAVEWESNGQPENNYKTTPPVLDSDGSFFLYSKLTVDKSRWQQGNVFSCSVMHEALHNHYTQKSLSLEPG

SEQ ID NO: 271 - protein, 329 aa, Artificial Sequence
  IgG1-IF16-CH1-Fc-charges   (Figure 92U)
ASTKGPSVFPLAPSSKSTSGGTAALGCLVKDYFPEPVTVSWNSGALESGVHTFPAVLQSSGLYSLSSVVTVPSSSLGTQTYICNVNHKPSDTEVDKKVEPKSCDKTHTCPPCPAPELLGGPSVFLFPPKPKDTLMISRTPEVTCVVVDVSHEDPEVEFNWYVDGVEVHNAKTKPREEQYNSTYRVVSVLTVLHQDWLNGKEYKCKVSNKALPAPIEKTISKAKGQPREPQVYTLPPSEEEMEKNEVSLTCLVKGFYPSDIAVEWESNGQPEENYKTTPPVLDSDGSFFLYSKLTVDKSRWQQGNVFSCSVMHEALHNHYTQKSLSLEPG

SEQ ID NO: 272 - protein, 329 aa, Artificial Sequence
  IgG1-IF10-ISO-CH1-Fc-charges   (Figure 92U)
ASTKGPSVFPLAPSSKSTSGGTAALGCLVKDYFPEPVTVSWNSGALTSGVHTFPAVLQSSGLYSLSSVVTVPSSSLGTQTYICNVNHKPSDTEVDKKVEPKSCDKTHTCPPCPAPELLGGPSVFLFPPKPKDTLMISRTPEVTCVVVDVSHEDPEVQFNWYVDGVEVHNAKTKPREEQYNSTYRVVSVLTVLHQDWLNGKEYKCKVSNKALPAPIEKTISKAKGQPREPQVYTLPPSEEEMTKNQVSLTCLVKGFYPSDIAVEWESSGQPENNYNTTPPMLDSDGSFFLYSKLTVDKSRWQEGNVFSCSVMHEALHNHYTQKSLSLEPG

SEQ ID NO: 273 - protein, 329 aa, Artificial Sequence
  IgG1-IF16-ISO-CH1-Fc-charges   (Figure 92U)
ASTKGPSVFPLAPSSKSTSGGTAALGCLVKDYFPEPVTVSWNSGALESGVHTFPAVLQSSGLYSLSSVVTVPSSSLGTQTYICNVNHKPSDTEVDKKVEPKSCDKTHTCPPCPAPELLGGPSVFLFPPKPKDTLMISRTPEVTCVVVDVSHEDPEVEFNWYVDGVEVHNAKTKPREEQYNSTYRVVSVLTVLHQDWLNGKEYKCKVSNKALPAPIEKTISKAKGQPREPQVYTLPPSEEEMEKNEVSLTCLVKGFYPSDIAVEWESSGQPENNYNTTPPMLDSDGSFFLYSKLTVDKSRWEEGNVFSCSVMHEALHNHYTQKSLSLEPG

SEQ ID NO: 274 - protein, 329 aa, Artificial Sequence
  IgG1-pI-ISO(-)   (Figure 92V)
ASTKGPSVFPLAPSSKSTSGGTAALGCLVKDYFPEPVTVSWNSGALTSGVHTFPAVLQSSGLYSLSSVVTVPSSSLGTQTYTCNVDHKPSNTKVDKKVEPKSCDKTHTCPPCPAPELLGGPSVFLFPPKPKDTLMISRTPEVTCVVVDVSHEDPEVQFNWYVDGVEVHNAKTKPREEQYNSTYRVVSVLTVLHQDWLNGKEYKCKVSNKALPAPIEKTISKAKGQPREPQVYTLPPSQEEMTKNQVSLTCLVKGFYPSDIAVEWESSGQPENNYNTTPPMLDSDGSFFLYSKLTVDKSRWQEGNVFSCSVMHEALHNHYTQKSLSLSPG

SEQ ID NO: 275 - protein, 330 aa, Artificial Sequence
  IgG1-pI-ISO(+RR)  (Figure 92V)
ASTKGPSVFPLAPSSKSTSGGTAALGCLVKDYFPEPVTVSWNSGALTSGVHTFPAVLQSSGLYSLSSVVTVPSSSLGTKTYTCNVNHKPSNTKVDKKVERKSCDKTHTCPRCPAPELLGGPSVFLFPPKPKDTLMISRTPEVTCVVVDVSHEDPEVKFKWYVDGVEVHNAKTKPREEQYNSTYRVVSVLTVLHQDWLNGKEYKCKVSNKALPAPIEKTISKAKGQPREPQVYTLPPSREEMTKNQVSLTCLVKGFYPSDIAVEWESNGQPENNYKTTPPVLDSDGSFFLYSKLTVDKSRWQQGNVFSCSVMHEALHNHYTQKSLSLSPGK

SEQ ID NO: 276 - protein, 330 aa, Artificial Sequence
  IgG1-pI-ISO(+)  (Figure 92V)
ASTKGPSVFPLAPSSKSTSGGTAALGCLVKDYFPEPVTVSWNSGALTSGVHTFPAVLQSSGLYSLSSVVTVPSSSLGTKTYTCNVNHKPSNTKVDKKVEPKSCDKTHTCPPCPAPELLGGPSVFLFPPKPKDTLMISRTPEVTCVVVDVSHEDPEVKFKWYVDGVEVHNAKTKPREEQYNSTYRVVSVLTVLHQDWLNGKEYKCKVSNKALPAPIEKTISKAKGQPREPQVYTLPPSREEMTKNQVSLTCLVKGFYPSDIAVEWESNGQPENNYKTTPPVLDSDGSFFLYSKLTVDKSRWQQGNVFSCSVMHEALHNHYTQKSLSLSPGK

SEQ ID NO: 277 - protein, 107 aa, Artificial Sequence [sequence omitted]

SEQ ID NO: 278 - protein, 107 aa, Artificial Sequence [sequence omitted]

SEQ ID NO: 279 - protein, 107 aa, Artificial Sequence [sequence omitted]

SEQ ID NO: 280 - protein, 107 aa, Artificial Sequence [sequence omitted]

SEQ ID NO: 281 - protein, 107 aa, Artificial Sequence [sequence omitted]

SEQ ID NO: 282 - protein, 107 aa, Artificial Sequence [sequence omitted]

SEQ ID NO: 283 - protein, 107 aa, Artificial Sequence; identical to SEQ ID NO: 8
  Ck-pI(6)  (Figure 93A)

SEQ ID NO: 284 - protein, 107 aa, Artificial Sequence; identical to SEQ ID NO: 8
  Ck-pI(6) (B)  (Figure 93A)

SEQ ID NO: 285 - protein, 107 aa, Artificial Sequence; identical to SEQ ID NO: 8
  Ck-pI(6) (C)  (Figure 93A)

SEQ ID NO: 286 - protein, 107 aa, Artificial Sequence; identical to SEQ ID NO: 8
  Ck-pI(6) (D)  (Figure 93A)

SEQ ID NO: 287 - protein, 107 aa, Artificial Sequence
  Ck-pI(3)  (Figure 93A)
RTVAAPSVFIFPPSDEQLESGTASVVCLLNNFYPREAEVQWKVDNALQSGNSQESVTEQDSEDSTYSLSSTLTLSKADYEKHKVYACEVTHQGLSSPVTKSFNRGEC

SEQ ID NO: 288 - protein, 111 aa, Artificial Sequence
  Ck-pI(6-DEDE)  (Figure 93A)
RTVAAPSVFIFPPSDEQLESGTASVVCLLNNFYPREAEVQWKVDDALQEGNSQESVTEQDSEDSTYSLSSTLTLSKADYEKHKVYACEVTHQGLESPVTKSFNRGECDEDE

SEQ ID NO: 289 - protein, 107 aa, Artificial Sequence; identical to SEQ ID NO: 287
  Ck-pI(3) (B)  (Figure 93B)

SEQ ID NO: 290 - protein, 107 aa, Artificial Sequence; identical to SEQ ID NO: 8
  Ck-pI(6) (E)   (Figure 93B)

SEQ ID NO: 291 - protein, 111 aa, Artificial Sequence; identical to SEQ ID NO: 288
  Ck-pI(6-DEDE) (B)   (Figure 93B)

SEQ ID NO: 292 - protein, 107 aa, Artificial Sequence [sequence omitted]

SEQ ID NO: 293 - protein, 107 aa, Artificial Sequence [sequence omitted]

SEQ ID NO: 294 - protein, 107 aa, Artificial Sequence [sequence omitted]

SEQ ID NO: 295 - protein, 107 aa, Artificial Sequence; identical to SEQ ID NO: 287
  Ck-pI(3) (C)   (Figure 93B)

SEQ ID NO: 296 - protein, 107 aa, Artificial Sequence; identical to SEQ ID NO: 8
  Ck-pI(6) (F)   (Figure 93B)

SEQ ID NO: 297 - protein, 111 aa, Artificial Sequence; identical to SEQ ID NO: 288
  Ck-pI(6-DEDE) (C)   (Figure 93B)

SEQ ID NO: 298 - protein, 107 aa, Artificial Sequence [sequence omitted]

SEQ ID NO: 299 - protein, 107 aa, Artificial Sequence; identical to SEQ ID NO: 287
  Ck-pI(3) (d)   (Figure 93B)

SEQ ID NO: 300 - protein, 107 aa, Artificial Sequence; identical to SEQ ID NO: 8
  Ck-pI(6) (G)   (Figure 93B)

SEQ ID NO: 301 - protein, 111 aa, Artificial Sequence; identical to SEQ ID NO: 288
  Ck-pI(6-DEDE) (D)   (Figure 93B)

SEQ ID NO: 302 - protein, 107 aa, Artificial Sequence
  Ck-pI(4)   (Figure 93B)
RTVAAPSVFIFPPSDEQLESGTASVVCLLNNFYPREAEVQWKVDNALQSGNSQESVTEQDSEDSTYSLSSTLTLSKADYEKHKVYACEVTHQGLSSPVTESFNRGEC

SEQ ID NO: 303 - protein, 107 aa, Artificial Sequence; identical to SEQ ID NO: 302
  Ck-pI(4) (B)   (Figure 93B)

SEQ ID NO: 304 - protein, 107 aa, Artificial Sequence; identical to SEQ ID NO: 302
  Ck-pI(4) (C)   (Figure 93C)

SEQ ID NO: 305 - protein, 107 aa, Artificial Sequence; identical to SEQ ID NO: 302
  Ck-pI(4) (D)   (Figure 93C)

SEQ ID NO: 306 - protein, 107 aa, Artificial Sequence
  CK-N152D S156E S202E   (Figure 93C)
RTVAAPSVFIFPPSDEQLKSGTASVVCLLNNFYPREAKVQWKVDDALQEGNSQESVTEQDSKDSTYSLSSTLTLSKADYEKHKVYACEVTHQGLESPVTKSFNRGEC

SEQ ID NO: 307 - protein, 107 aa, Artificial Sequence; identical to SEQ ID NO: 59
  CK-K126Q K145Q K169Q   (Figure 93C)

SEQ ID NO: 308 - protein, 107 aa, Artificial Sequence; identical to SEQ ID NO: 287
  CK-K126E K145E K169E   (Figure 93C)

SEQ ID NO: 309 - protein, 107 aa, Artificial Sequence [sequence omitted]

SEQ ID NO: 310 - protein, 107 aa, Artificial Sequence [sequence omitted]

SEQ ID NO: 311 - protein, 107 aa, Artificial Sequence [sequence omitted]

SEQ ID NO: 312 - protein, 107 aa, Artificial Sequence [sequence omitted]

SEQ ID NO: 313 - protein, 107 aa, Artificial Sequence; identical to SEQ ID NO: 302
  Ck-pI(4) (E)   (Figure 93C)

SEQ ID NO: 314 - protein, 107 aa, Artificial Sequence; identical to SEQ ID NO: 302
  Ck-pI(4) (F)   (Figure 93C)

SEQ ID NO: 315 - protein, 107 aa, Artificial Sequence; identical to SEQ ID NO: 302
  Ck-pI(4) (G)   (Figure 93C)

SEQ ID NO: 316 - protein, 107 aa, Artificial Sequence; identical to SEQ ID NO: 302
  Ck-pI(4) (H)   (Figure 93C)

SEQ ID NO: 317 - protein, 107 aa, Artificial Sequence [sequence omitted]

SEQ ID NO: 318 - protein, 107 aa, Artificial Sequence [sequence omitted]

SEQ ID NO: 319 - protein, 107 aa, Artificial Sequence [sequence omitted]

SEQ ID NO: 320 - protein, 107 aa, Artificial Sequence [sequence omitted]

SEQ ID NO: 321 - protein, 107 aa, Artificial Sequence [sequence omitted]

SEQ ID NO: 322 - protein, 107 aa, Artificial Sequence [sequence omitted]

SEQ ID NO: 323 - protein, 107 aa, Artificial Sequence [sequence omitted]

SEQ ID NO: 324 - protein, 107 aa, Artificial Sequence [sequence omitted]

SEQ ID NO: 325 - protein, 107 aa, Artificial Sequence [sequence omitted]

SEQ ID NO: 326 - protein, 107 aa, Artificial Sequence [sequence omitted]

SEQ ID NO: 327 - protein, 107 aa, Artificial Sequence [sequence omitted]

SEQ ID NO: 328 - protein, 107 aa, Artificial Sequence [sequence omitted]

SEQ ID NO: 329 - protein, 107 aa, Artificial Sequence [sequence omitted]

SEQ ID NO: 330 - protein, 107 aa, Artificial Sequence [sequence omitted]

SEQ ID NO: 331 - protein, 107 aa, Artificial Sequence [sequence omitted]

SEQ ID NO: 332 - protein, 107 aa, Artificial Sequence [sequence omitted]

SEQ ID NO: 333 - protein, 107 aa, Artificial Sequence [sequence omitted]

SEQ ID NO: 334 - protein, 107 aa, Artificial Sequence [sequence omitted]

SEQ ID NO: 335 - protein, 107 aa, Artificial Sequence [sequence omitted]

SEQ ID NO: 336 - protein, 107 aa, Artificial Sequence [sequence omitted]

SEQ ID NO: 337 - protein, 107 aa, Artificial Sequence [sequence omitted]

SEQ ID NO: 338 - protein, 107 aa, Artificial Sequence [sequence omitted]

SEQ ID NO: 339 - protein, 107 aa, Artificial Sequence [sequence omitted]

SEQ ID NO: 340 - protein, 107 aa, Artificial Sequence [sequence omitted]

SEQ ID NO: 341 - protein, 107 aa, Artificial Sequence [sequence omitted]

SEQ ID NO: 342 - protein, 107 aa, Artificial Sequence [sequence omitted]

SEQ ID NO: 343 - protein, 107 aa, Artificial Sequence; identical to SEQ ID NO: 30
  Ck-Iso(3)  (Figure 93E)

SEQ ID NO: 344 - protein, 107 aa, Artificial Sequence
  Ck-Iso(4)  (Figure 93E)
QTVAAPSVFIFPPSDEQLQSGTASVVCLLNNFYPREATVQWKVDNALQSGNSQESVTEQDSKDSTYSLSSTLTLSKADYEKHKVYACEVTHEGLSSPVTKSFNRGEC

SEQ ID NO: 345 - protein, 107 aa, Artificial Sequence; identical to SEQ ID NO: 32
  Ck-Iso(5)  (Figure 93E)

SEQ ID NO: 346 - protein, 107 aa, Artificial Sequence; identical to SEQ ID NO: 33
  Ck-Iso(6)  (Figure 93E)

SEQ ID NO: 347 - protein, 107 aa, Artificial Sequence [sequence omitted]

SEQ ID NO: 348 - protein, 107 aa, Artificial Sequence [sequence omitted]

SEQ ID NO: 349 - protein, 107 aa, Artificial Sequence [sequence omitted]

SEQ ID NO: 350 - protein, 107 aa, Artificial Sequence [sequence omitted]

SEQ ID NO: 351 - protein, 107 aa, Artificial Sequence [sequence omitted]

SEQ ID NO: 352 - protein, 107 aa, Artificial Sequence [sequence omitted]

SEQ ID NO: 353 - protein, 107 aa, Artificial Sequence [sequence omitted]

SEQ ID NO: 354 - protein, 107 aa, Artificial Sequence [sequence omitted]

SEQ ID NO: 355 - protein, 107 aa, Artificial Sequence [sequence omitted]

SEQ ID NO: 356 - protein, 107 aa, Artificial Sequence [sequence omitted]

SEQ ID NO: 357 - protein, 107 aa, Artificial Sequence [sequence omitted]

SEQ ID NO: 358 - protein, 107 aa, Artificial Sequence [sequence omitted]

SEQ ID NO: 359 - protein, 107 aa, Artificial Sequence [sequence omitted]

SEQ ID NO: 360 - protein, 107 aa, Artificial Sequence [sequence omitted]

SEQ ID NO: 361 - protein, 107 aa, Artificial Sequence; identical to SEQ ID NO: 302
  Ck-pI(4) (DD)  (Figure 93F)

SEQ ID NO: 362 - protein, 107 aa, Artificial Sequence; identical to SEQ ID NO: 302
  Ck-pI(4) (EE)  (Figure 93F)

SEQ ID NO: 363 - protein, 107 aa, Artificial Sequence [sequence omitted]

SEQ ID NO: 364 - protein, 107 aa, Artificial Sequence; identical to SEQ ID NO: 30
  Ck-Iso(3) (B)  (Figure 93G)

SEQ ID NO: 365 - protein, 107 aa, Artificial Sequence; identical to SEQ ID NO: 344
  Ck-Iso(4) (B)  (Figure 93G)

SEQ ID NO: 366 - protein, 107 aa, Artificial Sequence; identical to SEQ ID NO: 32
  Ck-Iso(5) (C)  (Figure 93G)

SEQ ID NO: 367 - protein, 107 aa, Artificial Sequence; identical to SEQ ID NO: 30
  Ck-Iso(3) C)  (Figure 93G)

SEQ ID NO: 368 - protein, 107 aa, Artificial Sequence; identical to SEQ ID NO: 344
  Ck-Iso(4) (C)  (Figure 93G)

SEQ ID NO: 369 - protein, 107 aa, Artificial Sequence; identical to SEQ ID NO: 32
  Ck-Iso(5) (C)  (Figure 93G)

SEQ ID NO: 370 - protein, 107 aa, Artificial Sequence; identical to SEQ ID NO: 30
  Ck-Iso(3) (D)  (Figure 93G)

SEQ ID NO: 371 - protein, 107 aa, Artificial Sequence; identical to SEQ ID NO: 344
  Ck-Iso(4) (D)  (Figure 93G)

SEQ ID NO: 372 - protein, 107 aa, Artificial Sequence; identical to SEQ ID NO: 32
  Ck-Iso(5) (D)  (Figure 93G)

SEQ ID NO: 373 - protein, 107 aa, Artificial Sequence; identical to SEQ ID NO: 302
  Ck-pI(4) (GG)  (Figure 93G)

SEQ ID NO: 374 - protein, 107 aa, Artificial Sequence; identical to SEQ ID NO: 32
  Ck-Iso(5) (E)  (Figure 93G)

SEQ ID NO: 375 - protein, 107 aa, Artificial Sequence; identical to SEQ ID NO: 32
  Ck-Iso(5) (F)  (Figure 93G)

SEQ ID NO: 376 - protein, 107 aa, Artificial Sequence
  CK-v8  (Figure 93G)
RTVAAPSVFIFPPSDEQLESGTASVVCLLNNFYPREAEVQWKVDDALQSGNSQESVTEQDSEDSTYSLSSTLTLSKADYEKHKVYACEVTHQGLESPVTKSFNRGEC

SEQ ID NO: 377 - protein, 107 aa, Artificial Sequence
  CK-v28  (Figure 93G)
RTVAAPSVFIFPPSDEQLESGTASVVCLLNNFYPREAEVQWKVDNALQEGNSQESVTEQDSEDSTYSLSSTLTLSKADYEKHKVYACEVTHQGLESPVTKSFNRGEC

SEQ ID NO: 378 - protein, 107 aa, Artificial Sequence
  CK-v23  (Figure 93G)
RTVAAPSVFIFPPSDEQLESGTASVVCLLNNFYPREAEVQWKVDNALQSGNSQESVTEQDSEDSTYSLSSTLTLSKADYEKHKVYACEVTHQGLESPVTKSFNRGEC

SEQ ID NO: 379 - protein, 107 aa, Artificial Sequence
  CK-v12  (Figure 93H)
RTVAAPSVFIFPPSDEQLKSGTASVVCLLNNFYPREAEVQWKVDNALQSGNSQESVTEQDSEDSTYSLSSTLTLSKADYEKHKVYACEVTHQGLSSPVTKSFNRGEC

SEQ ID NO: 380 - protein, 107 aa, Artificial Sequence; identical to SEQ ID NO: 376
  CK-v8 (B)  (Figure 93H)

SEQ ID NO: 381 - protein, 107 aa, Artificial Sequence; identical to SEQ ID NO: 377
  CK-v28 (B)  (Figure 93H)

SEQ ID NO: 382 - protein, 107 aa, Artificial Sequence; identical to SEQ ID NO: 378
  CK-v23 (B)  (Figure 93H)

SEQ ID NO: 383 - protein, 107 aa, Artificial Sequence; identical to SEQ ID NO: 379
  CK-v12 (B)  (Figure 93H)

SEQ ID NO: 384 - protein, 107 aa, Artificial Sequence; identical to SEQ ID NO: 376
  CK-v8 (C)  (Figure 93H)

SEQ ID NO: 385 - protein, 107 aa, Artificial Sequence; identical to SEQ ID NO: 377
  CK-v28 (C)  (Figure 93H)

SEQ ID NO: 386 - protein, 107 aa, Artificial Sequence; identical to SEQ ID NO: 378
  CK-v23 (C)  (Figure 93H)

SEQ ID NO: 387 - protein, 107 aa, Artificial Sequence; identical to SEQ ID NO: 379
  CK-v12 (C)  (Figure 93H)

SEQ ID NO: 388 - protein, 107 aa, Artificial Sequence; identical to SEQ ID NO: 378
  CK-v23 (D)  (Figure 93H)

SEQ ID NO: 389 - protein, 107 aa, Artificial Sequence; identical to SEQ ID NO: 379
  CK-v12 (D)  (Figure 93H)

SEQ ID NO: 390 - protein, 107 aa, Artificial Sequence; identical to SEQ ID NO: 379
  CK-v12 (E)  (Figure 93H)

SEQ ID NO: 391 - protein, 107 aa, Artificial Sequence; identical to SEQ ID NO: 378
  CK-v23 (E)  (Figure 93H)

SEQ ID NO: 392 - protein, 107 aa, Artificial Sequence; identical to SEQ ID NO: 378
  CK-v23 (F)  (Figure 93H)

SEQ ID NO: 393 - protein, 107 aa, Artificial Sequence; identical to SEQ ID NO: 379
  CK-v12 (F)  (Figure 93H)

SEQ ID NO: 394 - protein, 107 aa, Artificial Sequence; identical to SEQ ID NO: 378
  CK-v23 (G)  (Figure 93I)

SEQ ID NO: 395 - protein, 107 aa, Artificial Sequence; identical to SEQ ID NO: 379
  CK-v12 (G)   (Figure 93I)

SEQ ID NO: 396 - protein, 107 aa, Artificial Sequence; identical to SEQ ID NO: 379
  CK-v12 (H)   (Figure 93I)

SEQ ID NO: 397 - protein, 107 aa, Artificial Sequence; identical to SEQ ID NO: 378
  CK-v23 (H)   (Figure 93I)

SEQ ID NO: 398 - protein, 107 aa, Artificial Sequence; identical to SEQ ID NO: 379
  CK-v12 (I)   (Figure 93I)

SEQ ID NO: 399 - protein, 107 aa, Artificial Sequence; identical to SEQ ID NO: 378
  CK-v23 (I)   (Figure 93I)

SEQ ID NO: 400 - protein, 107 aa, Artificial Sequence [sequence omitted]

SEQ ID NO: 401 - protein, 107 aa, Artificial Sequence [sequence omitted]

SEQ ID NO: 402 - protein, 107 aa, Artificial Sequence [sequence omitted]

SEQ ID NO: 403 - protein, 333 aa, Artificial Sequence
  Variant heavy chain constant domain  (Spec. pg. 7)
  MISC_FEATURE (2)..(2): X may be Serine or Glutamic Acid
  MISC_FEATURE (14)..(14): X may be Serine or Cysteine
  MISC_FEATURE (16)..(16): X may be Lysine, Arginine or Glutamic Acid
  MISC_FEATURE (20)..(20): X may be Glycine or Glutamic Acid
  MISC_FEATURE (21)..(21): X may be Glycine or Serine
  MISC_FEATURE (47)..(47): X may be Threonine or Glutamic Acid
  MISC_FEATURE (75)..(75): X may be Serine or Asparagine
  MISC_FEATURE (76)..(76): X may be Leucine or Phenylalanine
  MISC_FEATURE (79)..(79): X may be Glutamine or Lysine
  MISC_FEATURE (82)..(82): X may be Isoleucine or Threonine
  MISC_FEATURE (86)..(86): X may be Asparagine or Aspartic Acid
  MISC_FEATURE (88)..(88): X may be Lysine, Glutamic Acid or Glutamine
  MISC_FEATURE (91)..(91): X may be Asparagine or Aspartic Acid
  MISC_FEATURE (93)..(93): X may be Lysine, Glutamic Acid or Glutamine
  MISC_FEATURE (97)..(97): X may be Lysine or Threonine
  MISC_FEATURE (100)..(100): X may beProline or Arginine
  MISC_FEATURE (102)..(102): X may be Serine or Cysteine
  MISC_FEATURE (104)..(104): X may be Aspartic Acid or a deletion
  MISC_FEATURE (105)..(105): X may be Lysine, Valine or Threonine
  MISC_FEATURE (106)..(106): X may be Threonine or a deletion
  MISC_FEATURE (107)..(107): X may be Histidine or Glutamic Acid
  MISC_FEATURE (108)..(108): X may be Threonine or a deletion
  MISC_FEATURE (116)..(116): X may be Glutamic Acid or Proline
  MISC_FEATURE (117)..(117): X may be Leucine or Valine
  MISC_FEATURE (118)..(118): X may be Leucine or Alanine or a deletion
  MISC_FEATURE (119)..(119): X may be Glycine or Alanine or a deletion
  MISC_FEATURE (157)..(157): X may be Lysine, Glutamine or Glutamic Acid
  MISC_FEATURE (179)..(179): X may be Tyrosine or Phenylalanine
  MISC_FEATURE (183)..(183): X may be Tyrosine or Phenylalanine
  MISC_FEATURE (192)..(192): X may be Leucine or Valine
  MISC_FEATURE (203)..(203): X may be Lysine or Glutamic Acid
  MISC_FEATURE (205)..(205): X may be Lysine or Glutamic Acid
  MISC_FEATURE (209)..(209): X may be Lysine or Glutamic Acid
  MISC_FEATURE (210)..(210): X may be Alanine or Glycine
  MISC_FEATURE (217)..(217): X may be Lysine or Glutamic Acid
  MISC_FEATURE (222)..(222): X may be Alanine or Threonine
  MISC_FEATURE (238)..(238): X may be Arginine, Glutamine or Glutamic Acid
  MISC_FEATURE (267)..(267): X may be Asparagine or Serine
  MISC_FEATURE (275)..(275): X may be Lysine, Asparagine or Glutamic Acid
  MISC_FEATURE (280)..(280): X may be Valine or Methionine
  MISC_FEATURE (302)..(302): X may be Glutamine or Glutamic Acid
  MISC_FEATURE (311)..(311): X may be Methionine or Leucine
  MISC_FEATURE (317)..(317): X may be Asparagine or Serine
  MISC_FEATURE (330)..(330): X may be Lysine and a deletion
  MISC_FEATURE (331)..(331): X may be Glutamic Acid or absent
  MISC_FEATURE (332)..(332): X may be Aspartic Acid or absent
  MISC_FEATURE (333)..(333): X may be Glutamic Acid or absent
AXTKGPSVFPLAPXSXSTSXXTAALGCLVKDYFPEPVTVSWNSGALXSGVHTFPAVLQSSGLYSLSSVVTVPSSXXGTXTYXCNVXHXPSXTXVDKXVEXKXCXXXXXCPPCPAPXXXXGPSVFLFPPKPKDTLMISRTPEVTCVVVDVSHEDPEVXFNWYVDGVEVHNAKTKPREEQXNSTXRVVSVLTVXHQDWLNGKEYXCXVSNXXLPAPIEXTISKXKGQPREPQVYTLPPSXEEMTKNQVSLTCLVKGFYPSDIAVEWESXGQPENNYXTTPPXLDSDGSFFLYSKLTVDKSRWQXGNVFSCSVXHEALHXHYTQKSLSLSPGXXXX

SEQ ID NO: 404 - protein, 111 aa, Artificial Sequence
  Variant light chain constant domain  (Spec. pg. 9)
  MISC_FEATURE (1)..(1): X may be Arginine or Glutamine
  MISC_FEATURE (17)..(17): X may be Glutamine or Glutamic Acid
  MISC_FEATURE (19)..(19): X may be Lysine, Glutamic Acid or Glutamine
  MISC_FEATURE (31)..(31): X may be Asparagine or Aspartic Acid
  MISC_FEATURE (38)..(38): X may be Lysine, Glutamic Acid, Glutamine or Threonine
  MISC_FEATURE (45)..(45): X may be Asparagine or Aspartic Acid
  MISC_FEATURE (49)..(49): X may be Serine or Glutamic Acid
  MISC_FEATURE (62)..(62): X may be Lysine, Glutamic Acid or Glutamine
  MISC_FEATURE (92)..(92): X may be Glutamine or Glutamic Acid
  MISC_FEATURE (95)..(95): X may be Serine or Glutamic Acid
  MISC_FEATURE (100)..(100): X may be Lysine or Glutamic Acid
  MISC_FEATURE (107)..(107): X may be Cysteine
  MISC_FEATURE (108)..(108): X may be Aspartic Acid or absent
  MISC_FEATURE (109)..(109): X may be Glutamic Acid or absent
  MISC_FEATURE (110)..(110): X imay be Aspartic Acid or absent
  MISC_FEATURE (111)..(111): X may be Glutamic Acid or absent
XTVAAPSVFIFPPSDEXLXSGTASVVCLLNXFYPREAXVQWKVDXALQXGNSQESVTEQDSXDSTYSLSSTLTLSKADYEKHKVYACEVTHXGLXSPVTXSFNRGEXXXXX

SEQ ID NO: 405 - protein, 329 aa, Artificial Sequence; identical to SEQ ID NO: 2
  lgG1-WT (Figure 19)

SEQ ID NO: 406 - protein, 325 aa, Artificial Sequence
  lgG2-WT (Figure 19)
ASTKGPSVFPLAPCSRSTSESTAALGCLVKDYFPEPVTVSWNSGALTSGVHTFPAVLQSSGLYSLSSVVTVPSSNFGTQTYTCNVDHKPSNTKVDKTVERKCCVECPPCPAPPVAGPSVFLFPPKPKDTLMISRTPEVTCWVDVSHEDPEVQFNWYVDGVEVHNAKTKPREEQFNSTFRVVSVLTVVHQDWLNGKEYKCKVSNKGLPAPIEKTISKTKGQPREPQVYTLPPSREEMTKNQVSLTCLVKGFYPSDIAVEWESNGQPENNYKTTPPMLDSDGSFFLYSKLTVDKSRWQQGNVFSCSVMHEALHNHYTQKSLSLSPGK

SEQ ID NO: 407 - protein, 122 aa, Artificial Sequence
  Bevacizumab VH (Figure 19)
EVQLVESGGGLVQPGGSLRLSCAASGYTFTNYGMNWVRQAPGKGLEWVGWINTYTGEPTYAADFKRRFTFSLDTSKSTAYLQMNSLRAEDTAWYCAKYPHYYGSSHWYFDVWGQGTLVTVSS

SEQ ID NO: 408 - protein, 106 aa, Artificial Sequence; identical to SEQ ID NO: 1
  CK-WT (Figure 20)

SEQ ID NO: 409 - protein, 106 aa, Artificial Sequence
  CK-pl(6) (Figure 20)
RTVAAPSVFIFPPSDEQLESGTASWCLLNNFYPREAEVQWKVDDALQEGNSQESVTEQDSEDSTYSLSSTLTLSKADYEKHKVYACEVTHQGLESPVTKSFNRGEC

SEQ ID NO: 410 - protein, 107 aa, Artificial Sequence [sequence omitted]

SEQ ID NO: 411 - protein, 104 aa, Artificial Sequence
  IgG1 (Figure 2)
ASTKGPSVFPLAPSSKSTSGGTAALGCLVKDYFPEPVTVSWNSGALTSGVHTFPAVLQSSGLYSLSSVVTVPSSSLGTQTYICNVNHKPSNTKVDKKRVEPKSC

SEQ ID NO: 412 - protein, 103 aa, Artificial Sequence
  IgG2 (Figure 2)
ASTKGPSVFPLAPCSRSTSESTAALGCLVKDYFPEPVTVSWNSGALTSGVHTFPAVLQSSGLYSLSSVVTVPSSNFGTQTYTCNVDHKPSNTKVDKTVERKCC

SEQ ID NO: 413 - protein, 206 aa, Artificial Sequence
  IgG3 (Figure 2)
ASTKGPSVFPLAPCSRSTSGGTAALGCLVKDYFPEPVTVSWNSGALTSGVHTFPAVLQSSGLYSLSSVVTVPSSSLGTQTYTCNVNHKPSNTKVDKRVELKTPASTKGPSVFPLAPCSRSTSGGTAALGCLVKDYFPEPVTVSWNSGALTSGVHTFPAVLQSSGLYSLSSVVTVPSSSLGTQTYTCNVNHKPSNTKVDKRVELKTP

SEQ ID NO: 414 - protein, 206 aa, Artificial Sequence
  IgG4 (Figure 2)
ASTKGPSVFPLAPCSRSTSESTAALGCLVKDYFPEPVTVSWNSGALTSGVHTFPAVLQSSGLYSLSSVVTVPSSSLGTKTYTCNVDHKPSNTKVDKRVESKYGASTKGPSVFPLAPCSRSTSESTAALGCLVKDYFPEPVTVSWNSGALTSGVHTFPAVLQSSGLYSLSSVVTVPSSSLGTKTYTCNVDHKPSNTKVDKRVESKYG

SEQ ID NO: 415 - protein, 107 aa, Artificial Sequence [sequence omitted]

SEQ ID NO: 416 - protein, 16 aa, Artificial Sequence
  IgG1  (Figure 25)
DKTHTCPPCPAPELLG

SEQ ID NO: 417 - protein, 16 aa, Artificial Sequence
  pI-Iso3  (Figure 25)
DTTHTCPPCPAPELLG

SEQ ID NO: 418 - protein, 329 aa, Artificial Sequence; identical to SEQ ID NO: 184
  pl-iso3  (Figure 24)

SEQ ID NO: 419 - protein, 334 aa, Artificial Sequence
  IgG1  (Figure 24)
ASTKGPSVFPLAPSSKSTSGGTAALGCLVKDYFPEPVTVSWNSGALTSGVHTFPAVLQSSGLYSLSSVVTVPSSSLGTQTYICNVNHKPSNTKVDKKRVEPKSCDKTHTCPPCPAPELLGGPSVFLFPPKPKDTLMISRTPEVTCVVVDVSHEDPEVKFNWYVDCVEVHNAKTKPREEQYNSTYRVVSVLTVLHQDWLNGKEYKCKVSNKALPAPIEKTISKAKGQPREPQVYTLPPSRDELLMTKNQVSLTCLVKGFYPSDIAVEWESNGQPENNYKTTPPVLDSDGSFFLYSKLTVDKSRWQQGNVFSCSVMHEAGLHNHYTQKSLSLSPGK

SEQ ID NO: 420 - protein, 327 aa, Artificial Sequence
  IgG2  (Figure 24)
ASTKGPSVFPLAPCSRSTSESTAALGCLVKDYFPEPVTVSWNSGALTSGVHTFPAVLQSSGLYSLSSVVTVPSSNFGTQTYTCNVDHKPSNTKVDKTVERKCCVECPPCPAPPVAGPSVFLFPPKPKDTLMISRTPEVTCVVVDVSHEDPEVQFNWYVDCVMEVHNAKTKPREEQFNSTFRVVSVLTVVHQDWLNGKEYKCKVSNKGLPAPIEKTISKTKGQPREPQVYTLPPSREEMTKNQVSLTCLVKGFYPSDIAVEWESNGQPENNYKTTPPMLDSDGSFFLYSKLTVDKSRWQQGNVFSCSVMHEALHNHYTQKSLSLSPGK

SEQ ID NO: 421 - protein, 377 aa, Artificial Sequence; identical to SEQ ID NO: 4
  IgG3 (Figure 24)

SEQ ID NO: 422 - protein, 326 aa, Artificial Sequence
  IgG4 (Figure 24)
ASTKGPSVFPLAPCSRSTSESTAALGCLVKDYFPEPVTVSWNSGALTSGVHTFPAVLQSSGLYSLSSVVTVPSSSLGTKTYTCNVDHKPSNTKVDKRVESKYGPPCPSCPAPEFLGGPSVFLFPPKPKDTLMISRTPEVTCVVVDVSQEDPEVQFNWYVDGVEEHNAKTKPREEQFNSTYRVVSVLTVLHQDWLNGKEYKCKVSNKGLPSSIEKTISKAKGQPREPVYTLPPSQEEMTKNQVSLTCLVKGFYPSDIAVEWESNGQPENNYKTTPPVLDSDGSFFLYSRLTVDKSRWQEGNVFSCSVNHEALHNHYTQKSLSLSLGK

SEQ ID NO: 423 - protein, 107 aa, Artificial Sequence; identical to SEQ ID NO: 302
  CK (Figure 27)

SEQ ID NO: 424 - protein, 24 aa, Artificial Sequence
  WT   (Figure 29)
KKRKKKRRKKKKKKKRRKKKKKRK

SEQ ID NO: 425 - protein, 330 aa, Artificial Sequence
  Chain H  (Figure 43)
ASTKGPSVFPLAPSSKSTSGGTAALGCLVKDYFPEPVTVSWNSGALTSGVHTFPAVLQSSGLYSLSSVVTVPSSSLGTQTYICNVNHKPSNTKVDKKAEPKSCDKTHTCPPCPAPELLGGPSVFLFPPKPKDTLMISRTPEVTCVVVDVSHEDPEVKFNWYVDGVEVHNAKTKPREEQYNSTYRVVSVLTVLHQDWLNGKEYKCKVSNKALPAPIEKTISKAKGQPREPQVYTLPPSRDELTKNQVSLTCLVKGFYPSDIAVEWESNGQPENNYKTTPPVLDSDGSFFLYSKLTVDKSRWQQGNVFSCSVMHEALHNHYTQKSLSLSPGK

SEQ ID NO: 426 - protein, 334 aa, Artificial Sequence
  IgG1  (Figure 17)
ASTKGPSVFPLAPSSKSTSGGTAALGCLVKDYFPEPVTVSWNSGALTSGVHTFPAVLQSSGLYSLSSVVTVPSSSLGTQTYICNVNHKPSNTKVDKKRVEPKSCDKTHTCPPCPAPELLGGPSVFLFPPKPKDTLMISRTPEVTCVVVDVSHEDPEVKFNWYVDGVEVHNAKTKPREEQYNSTYRVVSVLTVLHQDWLNGKEYKCKVSNKALPAPIEKTISKAKGQPREPQVYTLPPSRDEELMTKNQVSLTCLVKGFYPSDIAVEWESNGQPENNYKTTPPVLDSDGSFFLYSKLTVDKSRWQQGNVFSCSVMHEAGLHNHYTQKSLSLSPGK

SEQ ID NO: 427 - protein, 327 aa, Artificial Sequence
  IgG2  (Figure 17)
ASTKGPSVFPLAPCSRSTSESTAALGCLVKDYFPEPVTVSWNSGALTSGVHTFPAVLQSSGLYSLSSVVTVPSSNFGTQTYTCNVDHKPSNTKVDKTVERKCCVECPPCPAPPVAGPSVFLFPPKPKDTLMISRTPEVTCVVVDVSHEDPEVQFNWYVDGVMEVHNAKTKPREEQFNSTFRVVSVLTVVHQDWLNGKEYKCKVSNKGLPAPIEKTISKTKGQPREPQVYTLPPSREEMTKNQVSLTCLVKGFYPSDIAVEWESNGQPENNYKTTPPMLDSDGSFFLYSKLTVDKSRWQQGNVFSCSVMHEALHNHYTQKSLSLSPGK

SEQ ID NO: 428 - protein, 377 aa, Artificial Sequence; identical to SEQ ID NO: 4
  IgG3  (Figure 17)

SEQ ID NO: 429 - protein, 327 aa, Artificial Sequence
  IgG4  (Figure 17)
ASTKGPSVFPLAPCSRSTSESTAALGCLVKDYFPEPVTVSWNSGALTSGVHTFPAVLQSSGLYSLSSVVTVPSSSLGTKTYTCNVDHKPSNTKVDKRVESKYGPPCPSCPAPEFLGGPSVFLVPPKPKDTLMISRTPEVTCVVVDVSQEDPEVQFNWYVDGVEVHNAKTKPREEQFNSTYRVVSVLTVLHQDWLNGKEYKCKVSNKGLPSSIEKTISKAKGQPREPQVYTLPPSQEEMTKNQVSLTCLVKGFYPSDIAVEWESNGQPENNYKTTPPVLDSDGSFFLYSRLTVDKSRWQEGNVFSCSVMHEALHNHYTQKSLSLSLGK

SEQ ID NO: 430 - protein, 330 aa, Artificial Sequence; identical to SEQ ID NO: 149
  IgG1  (Figure 52)

SEQ ID NO: 431 - protein, 326 aa, Artificial Sequence; identical to SEQ ID NO: 150
  IgG2  (Figure 52)

SEQ ID NO: 432 - protein, 332 aa, Artificial Sequence; identical to SEQ ID NO: 151
  IgG3  (Figure 52)

SEQ ID NO: 433 - protein, 327 aa, Artificial Sequence; identical to SEQ ID NO: 152
  IgG4  (Figure 52)

SEQ ID NO: 434 - protein, 329 aa, Artificial Sequence; identical to SEQ ID NO: 166
  PI-Iso1  (Figure 52)

SEQ ID NO: 435 - protein, 325 aa, Artificial Sequence; identical to SEQ ID NO: 19
  IgG-pI-Iso2  (Figure 52)

SEQ ID NO: 436 - protein, 329 aa, Artificial Sequence; identical to SEQ ID NO: 184
  IgG-pI-Iso3  (Figure 52)

SEQ ID NO: 437 - protein, 329 aa, Artificial Sequence; identical to SEQ ID NO: 262
  IgG1-pI-IF16-ISO  (Figure 52)

SEQ ID NO: 438 - protein, 329 aa, Artificial Sequence; identical to SEQ ID NO: 263
  IgG1-pI-IF10-ISO  (Figure 52)

SEQ ID NO: 439 - protein, 329 aa, Artificial Sequence; identical to SEQ ID NO: 274
  Iso(-)  (Figure 52)

SEQ ID NO: 440 - protein, 330 aa, Artificial Sequence; identical to SEQ ID NO: 275
  ISO(+RR)  (Figure 52)

SEQ ID NO: 441 - protein, 330 aa, Artificial Sequence; identical to SEQ ID NO: 276
  ISO(+)  (Figure 52)

SEQ ID NO: 442 - protein, 107 aa, Artificial Sequence
  Chain L  (Figure 43)
RTVAAPSVFIFPPSDEQLKSGTASVVCLLNNFYPREAKVQWKVDNALQSGNSQESVTEQDSKDSTYSLSSTLTLSKADYEKHKVYACEVTHQGLRSPVTKSFNRGEC

SEQ ID NO: 443 - protein, 107 aa, Artificial Sequence [sequence omitted]

SEQ ID NO: 444 - protein, 104 aa, Artificial Sequence
  Lamda  (Figure 18)
QPKAAPSVTLFPPSSEELQANKATLVCLISDFYPGAVTVAWKADSSPVKAGVETTTPSKQSNNKYAASSYLSLTPEQWKSHRSYSCQVTHEGSTVEKTVAPTEC

1. A composition comprising a heterodimer protein comprising:
a) a first monomer comprising:
i) a first variant heavy chain constant region;
ii) a first fusion partner; and
b) a second monomer comprising:
i) a second variant heavy chain constant region;
ii) a second fusion partner;
wherein the pIs of said first and second variant heavy chain constant regions are at least 0.5 logs apart.

2. A composition according to claim 1 wherein the pIs of said first and second monomer are at least 0.5 logs apart.

3. A composition according to claim 1 or 2 wherein said first monomer comprises a third fusion partner.

4. A composition according to claim 1, 2 or 3 wherein said second monomer comprises a fourth fusion partner.

5. A composition according to claims 1, 3 and 4 wherein said fusion partners are independently selected from the group consisting of an immunoglobulin component, a peptide, a cytokine, a chemokine, an immune receptor and a blood factor.

6. A composition according to claim 5 wherein said immunoglobulin component is selected from the group consisting of Fab, VH, VL, scFv, scFv2, dAb.

7. A composition according to claim 5 wherein said cytokine is selected from the group consisting of IL-2, IL-10, IL-12 and GM-CSF.

8. A composition according to claim 5 wherein said chemokine is selected from the group consisting of RANTES, CXCL9, CXCL10 and CXCL12.

9. A composition according to claim 5 wherein said immune receptor is selected from the group consisting of CTLA-4, TNFRI, TNFRII, a TNFSF protein, and TNFRSF

10. A composition according to claim 5 wherein said blood factor is selected from the group consisting of Factor VII, Factor VIII and Factor IX.

11. A composition according any previous claim wherein one of said variant heavy chain constant regions comprises an amino acid substitution selected from the group consisting of Q196K, P217R, P228R, N276K, H435R and Y436F.

12. A composition according to 11 further comprising wherein one of said variant heavy chain constant regions further comprises a variant selected from the group consisting of S119E, K133E, K133Q, R133E (in case of IgG2-4), R133Q (in case of IgG2-4), T164E, K205E, K205Q, N208D, K210E, K210Q, K274E, K320E, K322E, K326E, K334E, R355E, K392E, Deletion of K447, adding peptide DEDE at the c-terminus, G137E, N₂₀₃D, K274Q, R355Q, K392N and Q419E, 349A, 349C, 349E, 349I, 349K, 349S, 349T, 349W, 351E, 351K, 354C, 356K, 357K, 364C, 364D, 364E, 364F, 364G, 364H, 364R, 364T, 364Y, 366D, 366K, 366S, 366W, 366Y, 368A, 368E, 368K, 368S, 370C, 370D, 370E, 370G, 370R, 370S, 370V, 392D, 392E, 394F, 394S, 394W, 394Y, 395T, 395V, 396T, 397E, 397S, 397T, 399K, 401K, 405A, 405S, 407T, 407V, 409D, 409E, 411D, 411E, 411K, 439D, 349C/364E, 349K/351K, 349K/351K/394F, 349K/354C, 349K/394F, 349K/394F/401K, 349K/394Y, 349K/401K, 349K/405A, 349T/351E/411E, 349T/394F, 349T/394F/401K, 349T/394F/411E, 349T/405A, 349T/411E, 351E/364D, 351E/364D/405A, 351E/364E, 351E/366D, 351K/364H/401K, 351K/366K, 364D/370G, 364D/394F, 364E/405A, 364E/405S, 364E/411E, 364E/411E/405A, 364H/394F, 364H/401K, 364H/401K/405A, 364H/405A, 364H/405A/411E, 364Y/370R, 370E/411E, 370R/411K, 395T/397S/405A and 397S/405A.

13. A composition comprising a heterodimeric antibody comprising:
a) a first heavy chain comprising a first variant heavy chain constant region; and
b) a second heavy chain comprising a second variant heavy chain constant region;
wherein the pIs of said first and second variant heavy chain constant regions are at least 0.5 logs apart.

14. A composition according any previous claim wherein one of said variant heavy chain constant regions comprises an amino acid substitution selected from the group consisting of Q196K, P217R, P228R, N276K, H435R and Y436F.

15. A composition according to claim 13 or 14 wherein said antibody further comprises a first and a second light chain.

16. A composition according to 15 wherein one of said light chains is a variant light chain comprising an amino acid substitution selected from the group consisting of K126E, K126Q, K145E, K145Q, N152D, S156E, K169E, S202E, K207E, an addition of DEDE at the C-terminus, R108Q, Q124E, K126Q, N138D, K145T and Q199E.

17. A composition comprising a heterodimeric antibody according to claim 13 wherein the pIs of said first and second variant heavy chain constant regions are at least 0.5 logs apart.

18. A composition according to any of the previous claims wherein said first and said second variant heavy chain constant region comprises CH2 and CH3.

19. A composition according to any of the previous claims wherein said first and said second variant heavy chain constant region comprises CH1, CH2 and CH3.

20. A composition according to claim 13 wherein said first heavy chain and said second heavy chain differ by at least 4 amino acids.

21. A composition according to 20 wherein said first heavy chain comprises 4 amino acid substitutions and said second chain has none.

22. A composition according to claim 20 wherein said first heavy chain comprises at least two amino acid substitutions and said second heavy chain comprises at least two amino acid substitutions, wherein said substitutions are different.

23. A nucleic acid encoding any of the proteins of claims 1-22.

24. A host cell encoding a nucleic acid according to claim 23.

25. A method of purifying a heterodimeric protein comprising:
a) providing a composition according to any of the previous claims;
b) loading said composition onto an ion exchange column; and
c) collecting the heterodimeric fraction.

26. A method of treating an individual in need thereof comprising administering the composition of any previous claim.

27. A composition comprising an antibody variant heavy chain constant region comprising an amino acid substitution selected from the group consisting of Q196K, P217R, P228R, N276K, H435R and Y436F.
